(19) United States
(12) Patent Application Publication
(10) Pub. No.: US 2020/0102370 A1
(43) Pub. Date: Apr. 2, 2020

(54) COLLAGEN-LOCALIZED IMMUNOMODULATORY MOLECULES AND METHODS THEREOF

(71) Applicant: Massachusetts Institute of Technology, Cambridge, MA (US)

(72) Inventors: Karl Dane WITTRUP, Boston, MA (US); Noor MOMIN, Cambridge, MA (US); Joseph PALMERI, Cambridge, MA (US); Magnolia CHINN, Cambridge, MA (US)

(21) Appl. No.: 16/523,965

(22) Filed: Jul. 26, 2019

Related U.S. Application Data
(60) Provisional application No. 62/738,981, filed on Sep. 28, 2018.

(51) Int. Cl. C07K 14/78; C07K 14/47; C07K 14/705; C07K 14/725; C07K 14/715; A61K 39/00

(52) U.S. Cl. CPC C07K 14/78; A61K 38/00; C07K 14/473; C07K 14/70521; C07K 14/70532; C07K 14/7051; C07K 14/7155; A61K 39/001106; A61K 39/001104; A61K 39/001129; C07K 2317/92; C07K 2319/74; C07K 2319/30; C07K 2319/03; C07K 14/4741

(57) ABSTRACT

The present disclosure provides immunomodulatory fusion proteins comprising a collagen-binding domain operably linked to an immunomodulatory domain. The disclosure also features compositions and methods of using the same, for example, to treat cancer.

### RELATED INFORMATION

[0001] This application claims the benefit of the priority date of U.S. Provisional Application No. 62/738,981, filed on Sep. 28, 2018, the content of which is hereby incorporated by reference in its entirety.

### GOVERNMENT FUNDING

[0002] This invention was made with Government support under Grant No(s) R01 CA096504 and R01 CA174795 both awarded by The National Institute of Health (NIH). The Government has certain rights in the invention.

### SEQUENCE LISTING

[0003] The instant application contains a Sequence Listing which has been submitted electronically in ASCII format via EFS-Web and is hereby incorporated by reference in its entirety. Said ASCII copy, created Nov. 22, 2019, is named “MITN-048_Sequence-Listing.txt” and is 767370 Kilobytes in size.

### BACKGROUND

[0004] While immunotherapy has transformed oncology with durable curative responses in a minority of patients, immune-related adverse events (irAEs) limit its broadest application (Michot et al. 2016, Eur J Cancer, 54:139-148). It is desired to restrict the most potent immune activation events to tumor tissue, while sparing non-tumor healthy tissue. An accepted objective of new immunotherapies is to “heat up” immunologically “cold” tumors, driving inflammation and immune cell infiltration (Chen and Mellman 2017, Nature, 541:321-330). Various tumor-localization approaches have been proposed: linking immunomodulatory agents to tumor-targeting modules in immunocytokines (Hutmacher and Neri 2018, Adv Drug Deliv Rev); masking agent activity systemically, with tumor-localized proteolytic activation (Thomas and Daugherty 2009, Protein Sci 18:2053-2059); intratumoral injection of the agents (Singh and Overwijk 2015, Nat Commun 8:1447; Ager et al. 2017, Cancer Immunol Res 5:676-684; Bommareddy et al. 2017, Cancer J 23:40-47; Milling et al. 2017, Adv Drug Deliv Rev 114:79-101; Singh et al. 2017, Nat Commun 8:1447; Sagiv-Barfi et al. 2018, Sci Transl Med 10:eaan4488); peritumoral injection of a solid biomaterial to entrap the agent (Park et al. 2018, Sci Transl Med, 10:eaar1916); conjugation to a solid particle (Kwong et al. 2013, Cancer Res 73:1547-1558) or conjugation of basic charged peptides to drive some nonspecific sticking of the agent to tumor extracellular matrix (Ishihara et al. 2017, Sci Transl Med 9:eaan0401; Ishihara et al. 2018, Mol Cancer Ther 17:2399-2411). A related but distinct approach is to localize growth factors in tissue to drive tissue regeneration (Nishi et al. 1998, Proc Natl Acad Sci 95:7018-7023; Martino et al. 2014, Science 343:885-888; Mitchell et al. 2016, Acta Biomater 30:1-12).

[0005] Significant problems exist with each of the current approaches above. Immunocytokines systemically expose immune cells to the immunomodulatory agent (Tzeng et al. 2015, Proc Natl Acad Sci 112:3320-3325). Masking agents may be unmasked outside target tissues, and the masking agent may complicate manufacturing and immunogenicity. Intratumoral injection often leads to rapid diffusion out of the tumor compartment. Conjugation of peptides at random sites is difficult to reproduce, can negatively impact specific activity, doesn't fully prevent tumor exit, and creates significant CMC issues due to the heterogeneous products of random conjugation methods.

[0006] Accordingly, there remains a need for novel immunotherapy approaches to promote tumor-localization and increase efficacy, while preventing systemic toxicity.

### SUMMARY OF THE DISCLOSURE

[0007] The present disclosure is based, at least in part, on the discovery that an immunomodulatory domain (e.g., cytokine, anti-immune receptor antibody, anti-tumor associated-antigen antibody, etc.) can be conjugated to a collagen-binding domain, resulting in enhanced anti-tumor efficacy relative to the unconjugated immunomodulatory domain. Without wishing to be bound by theory, collagen localization of an immunomodulatory domain results in enhanced anti-tumor efficacy because T cells become entrapped in collagen-rich zones around tumors, thus making such sites desirable for targeting of immunomodulatory agents. Almost half of human tumors exhibit an immune-excluded phenotype, wherein CD8+ T cells are apparently trapped within collagen-rich desmoplastic stroma (Mariathasan, et al., Nature, 2018, 554:544-548). Given the primary importance of CD8+ T cells in immunotherapeutic efficacy, there is a desire to localize immunomodulatory agents to this collagen-rich, CD8+ T cell-rich compartment of tumors. Specificity is of significance because prior agents which utilize nonspecific electrostatic interactions in small unstructured peptides for retention (Martino, et al., Science, 2014, 343:885-888), bind promiscuously to the great majority of negatively-charged extracellular matrix components rather than within the particular collagen-rich compartment of interest. Such unstructured, positively charged peptides also lead to relatively weak retention kinetics, wherein in some cases half of the injected conjugate payload leaking into systemic circulation (Ishihara, et al. Mol Cancer Ther. 2018, 17:2399-2411).

[0008] Accordingly, provided herein are immunomodulatory fusions to structured proteins with specific affinity for collagen, leading to greater retention within the particular collagen-rich compartments of interest. In some aspects described herein, the immunomodulatory fusion proteins comprise a cytokine, wherein the collagen-binding domain increases tumor retention and prevents systemic exposure to the cytokine following intratumoral administration in pre-clinical animal models, thereby reducing treatment-related toxicity. Furthermore, the immunomodulatory fusion proteins have increased anti-tumor efficacy and reduced toxicity compared to equivalent fusion proteins lacking collagen-binding domains when combined with one or more additional immunotherapies (e.g., tumor-targeting antibodies, checkpoint blockade, cancer vaccines, and T cell therapy.

[0009] As provided herein, these immunomodulatory fusion proteins demonstrate durable and systemic antitumor responses, enabling localized immunity against injected tumor and systemic immunity for effective treatment of a contralateral noninjected tumor. Neoadjuvant administration of the immunomodulatory fusion proteins also improved survival by preventing metastases following surgical excision of residual primary tumor, further demonstrating that the immunomodulatory fusion proteins promote systemic anti-tumor immunity. Thus, the immunomodulatory fusion proteins of the disclosure are useful for treating metastatic tumors and/or mediating abscopal effect in therapeutic (e.g., anti-cancer) modalities.

[0010] Also provided herein, are variant collagen-binding domains that have altered (e.g., increased or decreased) binding affinities for collagen. By disclosing a selection of variant collagen-binding domains with different collagen-binding affinities, the disclosures herein provide options for selecting immunomodulatory fusion proteins with different binding affinities for collagen-rich compartments (e.g., collagen-expressing tumors).

[0011] The collagen-binding compositions and methods provided herein allow for tumor- and payload-agnostic local targeting of active therapeutics. The collagen-binding compositions also demonstrate increase efficacy with concomitant decrease in toxicity associated with systemic immunotherapies.

[0012] In some aspects, the disclosure provides an immunomodulatory fusion protein comprising:

[0013] (i) an immunomodulatory domain;

[0014] (ii) a collagen-binding domain, wherein the collagen-binding domain specifically binds type I and/or type IV collagen and binds type I collagen with a K_{D}≤500 nM, and wherein the collagen-binding domain has an isoelectric point pI<10 and a molecular weight (MW) of ≥5 kDa; and

[0015] (iii) optionally, a linker,

[0016] wherein the immunomodulatory domain is operably linked with or without the linker to the collagen-binding domain.

[0017] In some aspects, the K_{D} of the collagen-binding domain for type I and/or type IV collagen is less than the K_{D} of the collagen-binding domain for an extracellular matrix component selected from fibronectin, vitronectin, osteopontin, tenascin C, or fibrinogen. In some aspects, the collagen-binding domain has a MW of about 5-100 kDa, about 10-80 kDa, about 20-60 kDa, about 30-50 kDa, or about 10 kDa, about 20 kDa, about 30 kDa, about 40 kDa, about 50 kDa, about 60 kDa, about 70 kDa, about 80 kDa, about 90 kDa or about 100 kDa.

[0018] In some aspects, the immunomodulatory fusion protein comprises a collagen-binding domain comprising one or more leucine-rich repeats which bind collagen. In some aspects, the collagen-binding domain comprises two, three, four, five, six, seven, eight, nine or ten leucine-rich repeats which bind collagen. In some aspects, the collagen-binding domain comprises one or more leucine-rich repeats from a human proteoglycan Class II member of the small leucine-rich proteoglycan (SLRP) family. In some aspects, the SLRP is selected from lumican, decorin, biglycan, fibromodulin, chondroadherin, asporin, PRELP, osteoadherin/osteomodulin, opticin, osteoglycin/mimecan, podocan, perlecan, and nidogen. In some aspects, the SLRP is lumican.

[0019] In some aspects, the immunomodulatory fusion protein comprises a collagen-binding domain comprising a human SLRP. In some aspects, the SLRP is selected from lumican, decorin, biglycan, fibromodulin, chondroadherin, asporin, PRELP, osteoadherin/osteomodulin, opticin, osteoglycin/mimecan, podocan, perlecan, and nidogen. In some aspects, the SLRP is lumican. In some aspects, lumican comprises the amino acid sequence as set forth in SEQ ID NO: 107.

[0020] In some aspects, the immunomodulatory fusion protein comprises a collagen-binding domain comprising a human type I glycoprotein having an Ig-like domain, or an extracellular portion thereof which binds collagen. In some aspects, the type I glycoprotein competes with lumican for binding for binding to collagen type I. In some aspects, the human type I glycoprotein is selected from LAIR1, LAIR2, and Glycoprotein IV. In some aspects, the human type I glycoprotein is LAIR1. In some aspects, the human type I glycoprotein is LAIR1 and the collagen-binding domain comprises amino acid residues 22-122 of the amino acid sequence as set forth in SEQ ID NO: 98. In some embodiments, the LAIR1 is a variant comprising one or more amino acid substitutions, additions or deletions, optionally two, three, four, five, six, seven, eight, nine, ten or more amino acid substitutions, additions or deletions relative to a LAIR1 protein comprising the amino acid sequence of SEQ ID NO: 98. In some embodiment, the LAIR1 variant has increased binding affinity to collagen relative to a collagen binding affinity of a LAIR1 protein comprising the amino acid sequence of SEQ ID NO: 98. In other further embodiments, the LAIR1 variant has decreased binding affinity to collagen relative to a collagen binding affinity of a LAIR1 protein comprising the amino acid sequence of SEQ ID NO: 98.

[0021] In any of the foregoing aspects, the immunomodulatory domain comprises a polypeptide that activates, enhances or promotes a response by an immune cell. In other aspects, the immunomodulatory domain comprises a polypeptide that inhibits, reduces or suppresses a response by an immune cell.

[0022] In some aspects, the immune cell is a lymphoid cell selected from an innate lymphoid cell, a T cell, a B cell, an NK cell, and a combination thereof. In other aspects, the immune cell is a myeloid cell selected from a monocyte, a neutrophil, a granulocyte, a mast cell, a macrophage, a dendritic cell, and a combination thereof.

[0023] In some aspects, the response by the immune cell comprises cytokine production, antibody production, production of antigen-specific immune cells, increased effector function and/or cytotoxicity, and a combination thereof.

[0024] In any of the foregoing aspects, the immunomodulatory domain comprises one or more selected from a cytokine, a chemokine, an activating ligand/receptor, an inhibitory ligand/receptor, or a combination thereof. In some aspects, the immunomodulatory domain comprises one or more cytokines.

[0025] In some aspects, the cytokine is a human gamma common chain receptor interleukin selected from IL-2, IL-4, IL-7, IL-9, IL-13, IL-15, IL-15/IL-15RA, IL-21, and a combination thereof. In some aspects, the cytokine is IL-2.

[0026] In some aspects, the cytokine is a human IL-12 family member selected from IL-12 (p35), IL-12 (p40), IL-12(p35)/IL-12(p40), IL-23, IL-27 IL-35, and a combination thereof. In some aspects, the cytokine is a single chain fusion of IL-12(p35)/IL-12(p40).

[0027] In other aspects, the cytokine is a human IL-1 family member selected from IL-1, IL-18, IL-33, and a combination thereof. In some aspects, the cytokine is IL-18.

[0028] In yet other aspects, the cytokine is selected from TNFα, INFα, IFN-γ, GM-CSF, FLT3L, G-CSF, M-CSF, and a combination thereof.

[0029] In some aspects, the immunomodulatory domain comprises one or more chemokines. In some aspects, the chemokine is selected from LIF, MIP-2, MIP-1α, MIP-1β, CXCL1, CXCL9, CXCL10, MCP-1, Eotaxin, RANTES, LIX and a combination thereof. In other aspects, the chemokine is selected from CCL3, CCL4, CCL5, Eotaxin and a combination thereof.

[0030] In any of the foregoing aspects, the immunomodulatory domain comprises one or more activating ligands/receptors. In some aspects, the activating ligand/receptor is selected from a TNF superfamily, a CD28 receptor superfamily, a B7 ligand family, and a T cell receptor. In other aspects, the activating ligand/receptor is a TNF superfamily ligand selected from TNF-alpha, CD40L, 4-1BBL, OX40, and a combination thereof. In yet other aspects, the activating ligand/receptor is a TNF superfamily receptor and the immunomodulatory domain comprises an antibody or antigen binding fragment thereof selected from an anti-TNFR1 antibody, an anti-TNFR2 antibody, an anti-CD40 antibody, an anti-4-1BB antibody and an anti-OX40 antibody. In other aspects, the activating ligand/receptor is a CD28 superfamily member or a B7 family member selected from ICOS ligand, CD80, and CD86, and a combination thereof. In yet other aspects, the activating ligand/receptor is a CD28 superfamily member and the immunomodulatory domain comprises an antibody or antigen binding fragment thereof selected from an anti-ICOS antibody and an anti-CD28 antibody. In further aspects, the activating ligand/receptor is a T cell receptor and the immunomodulatory domain comprises an antibody or antigen binding fragment thereof selected from an anti-CD3γ antibody, an anti-CD3δ antibody, an anti-CD3ζ antibody, and an anti-CD3ε antibody.

[0031] In some aspects, the activating ligand/receptor is selected from a TNF superfamily, a CD28 receptor superfamily, a B7 ligand family, a T cell receptor, a Killer Cell Ig-Like receptor, a Leukocyte Ig-Like receptor, a CD94/NKG2 receptor family, and an Fc receptor. In other aspects, the activating ligand/receptor is a Killer Cell Ig-Like Receptor Ligand and the immunomodulatory domain comprises antibody or antigen binding fragment thereof selected from an anti-KIR 2DS1 antibody, an anti-KIR 2DS2 antibody, an anti-KIR 2DS3 antibody, an anti-KIR 2DS4 antibody, an anti-KIR 2DS5 antibody and an anti-KIR 3DS1 antibody. In further aspects, the activating ligand/receptor is a Leukocyte Ig-Like receptor and the immunomodulatory domain comprises an anti-LIRA2 antibody or antigen binding fragment thereof. In other aspects, the activating ligand/receptor is an CD94/NKG2 receptor family member selected from MICA, MICB, ULBP1, ULBP2, ULBP3, ULBP4, ULBP5 (isoform 1) ULBP5 (isoform 2), and ULBP6. In yet other aspects, the activating ligand/receptor is an CD94/NKG2 receptor family member and the immunomodulatory domain comprises an antibody or antigen binding fragment thereof selected from an anti-CD94/NKG2D antibody, an anti-CD94/NKG2C antibody, an anti-CD94/NKG2E antibody, and an anti-CD94/NKG2H antibody. In further aspects, the activating ligand/receptor is an Fc receptor family member and the immunomodulatory domain comprises an antibody or antigen binding fragment thereof selected from anti-FcγRI antibody, an anti-FcγRIIC antibody, an anti-FcγRIIIA antibody, an anti-FcγRIIIB antibody, an anti-FcεRI antibody, an anti-FcεRII antibody, an anti-FcαR antibody, and an anti-FcμR antibody.

[0032] In any of the foregoing aspects, the immunomodulatory domain comprises one or more inhibitory ligands/receptors. In some aspects, the inhibitory ligand/receptor is selected from a CD28 receptor superfamily, a TNF superfamily, and a checkpoint inhibitor. In other aspects, the inhibitory ligand/receptor is a CD28 superfamily member and the immunomodulatory domain comprises an antibody or antigen binding fragment thereof selected from an anti-PD-1 antibody, an anti-PD-L1 antibody, an anti-PD-L2 antibody, an anti-CTLA4 antibody. In yet further aspects, the inhibitory ligand/receptor is a TNF superfamily member and the immunomodulatory domain comprises an antibody or antigen binding fragment selected from an anti-TIGIT antibody and an anti-BTLA antibody. In some aspects, the inhibitory ligand/receptor is a checkpoint inhibitor and the immunomodulatory domain comprises an antibody or antigen binding fragment selected from an anti-VISTA antibody, an anti-TIM-3 antibody, an anti-LAG-3 antibody, an anti-CD47 antibody, and an anti-SIRPα antibody.

[0033] In some aspects, the inhibitory ligand/receptor is selected from a CD28 receptor superfamily, a TNF superfamily, a Siglec family, a CD94/NKG2A family, a Leukocyte Ig-Like receptor family, Killer Cell Ig-Like Receptor Ligand, an Fc Receptor, an adenosine pathway molecule, and a checkpoint inhibitor. In other aspects, the inhibitory ligand/receptor comprises a Siglec family member and the immunomodulatory domain comprises an antibody or antigen binding fragment selected from an anti-Siglec 1 antibody, an anti-Siglec 2 antibody, an anti-Siglec 3 antibody, an anti-Siglec 4a antibody, an anti-Siglec 5 antibody, an anti-Siglec 6 antibody, an anti-Siglec 7 antibody, an anti-Siglec 8 antibody, an anti-Siglec 9 antibody, an anti-Siglec 10 antibody, an anti-Siglec 11 antibody and an anti-Siglec 12 antibody. In yet other aspects, the inhibitory ligand/receptor comprises a CD94/NKG2 receptor family inhibitory receptor or inhibitory ligand and the immunomodulatory domain comprises an antibody or antigen binding fragment selected from an anti-CD94/NKG2A antibody and an anti-CD94/NKG2B antibody. In some aspects, the inhibitory ligand/receptor comprises a Leukocyte Ig-Like Receptor and the immunomodulatory domain comprises an antibody or antigen binding fragment selected from an anti-LIRB1 antibody, an anti-LIRB2 antibody, an anti-LIRB3 antibody, an anti-LIRB4 antibody. In other aspects, the inhibitory ligand/receptor comprises a Killer Cell Ig-Like Receptor Ligand and the immunomodulatory domain comprises antibody or antigen binding fragment thereof selected from an anti-KIR 2DL1 antibody, an anti-KIR 2DL2 antibody, an anti-KIR 2DL3 antibody, an anti-KIR 2DL4 antibody, an anti-KIR 2DL5A antibody, an anti-KIR 2DL5B antibody, an anti-KIR 3DL1 antibody, an anti-KIR 3DL2 antibody and an anti-KIR 3DL3 antibody. In yet other aspects, the inhibitory ligand/receptor comprises an Fc receptor and the immunomodulatory domain comprises an anti-FcγRIIB antibody or antigen binding fragment. In some aspects, the inhibitory ligand/receptor comprises an adenosine pathway molecule and the immunomodulatory domain comprises an antibody or antigen binding fragment selected from an anti-CD39 antibody and anti-CD73 antibody. In other aspects, the inhibitory ligand/receptor comprises a checkpoint inhibitor and the immunomodulatory domain comprises an antibody or antigen binding fragment selected from is an anti-VISTA antibody, an anti-TIM-3 antibody an anti-LAG-3 antibody, an anti-CD47 antibody, and an anti-SIRPα antibody.

[0034] In any of the foregoing aspects, the immunomodulatory domain is operably linked to the collagen-binding domain via a linker. In some aspects, the linker is of sufficient length or mass to reduce adsorption of the immunomodulatory domain onto collagen fibrils. In some aspects, the linker provides sufficient molecular weight to the fusion protein reduce diffusion from a tissue. In some aspects, the linker allows for steric separation of the immunomodulatory domain from collagen fibrils to promote receptor/ligand engagement. In some aspects, the linker is a hydrophilic polypeptide comprising “N” amino acids in length, wherein 1-1000, 10-900, 30-800, 40-700, 50-600, 100-500, or 200-400. In some aspects, the linker is human serum albumin or fragment thereof. In other aspects, the linker comprises an Fc domain or a mutant Fc domain with reduced FcR interaction.

[0035] In any of the foregoing aspects, the immunomodulatory fusion protein is of sufficient mass to reduce size dependent escape by diffusion or convection upon administration in vivo. In some aspects, the fusion protein is ≥60 kDa. In some aspects, the immunomodulatory fusion protein binds type I and/or type IV collagen upon administration in vivo, thereby reducing systemic exposure of the immunomodulatory fusion protein.

[0036] In some aspects, the disclosure provides an immunomodulatory fusion protein comprising:

[0037] (i) at least one cytokine;

[0038] (ii) a collagen-binding domain, wherein the collagen-binding domain specifically binds type I and/or type IV collagen and binds type I collagen with a K_{D}≤500 nM, and wherein the collagen-binding domain has an isoelectric point pI<10 and a molecular weight (MW) of ≥5 kDa; and

[0039] (iii) a linker, wherein the linker is a hydrophilic polypeptide comprising “N” amino acids in length, wherein N=1-1000, 10-900, 30-800, 40-700, 50-600, 100-500, or 200-400, wherein the cytokine is operably linked via the linker to the collagen-binding domain, and wherein the fusion protein is ≥60 kDa. In some aspects, the K_{D} of the collagen-binding domain for type I and/or type IV collagen is less than the K_{D} of the collagen-binding domain for an extracellular matrix component selected from fibronectin, vitronectin, osteopontin, tenascin C, or fibrinogen. In some aspects, the collagen-binding domain comprises a human SLRP selected from lumican, decorin, biglycan, fibromodulin, chondroadherin, asporin, PRELP, osteoadherin/osteomodulin, opticin, osteoglycin/mimecan, podocan, perlecan, and nidogen. In some aspects, the SLRP is lumican. In some aspects, the lumican comprises the amino acid sequence as set forth in SEQ ID NO: 107. In other aspects, the collagen-binding domain is selected from LAIR1, LAIR2, and Glycoprotein IV. In some aspects, the collagen-binding domain is LAIR1. In some aspects, the collagen-binding domain comprises amino acid residues 22-122 of the amino acid sequence as set forth in SEQ ID NO: 98. In some embodiments, the LAIR1 is a variant comprising one or more amino acid substitutions, additions or deletions, optionally two, three, four, five, six, seven, eight, nine, ten or more amino acid substitutions, additions or deletions relative to a LAIR1 protein comprising the amino acid sequence of SEQ ID NO: 98. In some embodiment, the LAIR1 variant has increased binding affinity to collagen relative to a collagen binding affinity of a LAIR1 protein comprising the amino acid sequence of SEQ ID NO: 98. In other further embodiments, the LAIR1 variant has decreased binding affinity to collagen relative to a collagen binding affinity of a LAIR1 protein comprising the amino acid sequence of SEQ ID NO: 98.

[0040] In some aspects, the cytokine is a human gamma common chain receptor interleukin selected from IL-2, IL-4, IL-7, IL-9, IL-13, IL-15, IL-15/IL-15RA, IL-21, and a combination thereof. In some aspects, the cytokine is IL-2. In some aspects, the cytokine is a human IL-12 family member selected from IL-12 (p35), IL-12 (p40), IL-12(p35)/IL-12(p40), IL-23, IL-27, IL-35, and a combination thereof. In some aspects, the cytokine is a single chain fusion of IL-12(p35)/IL-12(p40). In some aspects, the immunomodulatory fusion protein comprises a second cytokine. In some aspects, the second cytokine is IL-2.

[0041] In other aspects, the cytokine is a human IL-1 family member selected from IL-1, IL-18, IL-33, and a combination thereof. In yet other aspects, the cytokine is selected from TNFα, INFα, IFN-γ, GM-CSF, FLT3L, G-CSF, M-CSF, and a combination thereof.

[0042] In some aspects, the linker is of sufficient length or mass to reduce adsorption of the immunomodulatory domain onto collagen fibrils, and/or provides sufficient molecular weight to the fusion protein reduce diffusion from a tissue and/or allows for steric separation of the immunomodulatory domain from collagen fibrils to promote receptor/ligand engagement. In some aspects, the linker is human serum albumin or fragment thereof. In other aspects, the linker comprises an Fc domain or a mutant Fc domain with reduced FcR interaction.

[0043] In some aspects, the fusion protein is of sufficient mass to reduce size dependent escape by diffusion or convection upon administration in vivo. In some aspects, the fusion protein binds type I and/or type IV collagen upon administration in vivo, thereby reducing systemic exposure of the immunomodulatory fusion protein.

[0044] In other aspects, the disclosure provides an immunomodulatory fusion protein comprising:

[0045] (i) at least one chemokine;

[0046] (ii) a collagen-binding domain, wherein the collagen-binding domain specifically binds type I and/or type IV collagen and binds type I collagen with a K_{D}≤500 nM, and wherein the collagen-binding domain has an isoelectric point pI<10 and a molecular weight (MW) of ≥5 kDa; and

[0047] (iii) a linker, wherein the linker is a hydrophilic polypeptide comprising “N” amino acids in length, wherein N=1-1000, 10-900, 30-800, 40-700, 50-600, 100-500, or 200-400, wherein the chemokine is operably linked via the linker to the collagen-binding domain, and wherein the fusion protein is ≥60 kDa. In some aspects, the K_{D} of the collagen-binding domain for type I and/or type IV collagen is less than the K_{D} of the collagen-binding domain for an extracellular matrix component selected from fibronectin, vitronectin, osteopontin, tenascin C, or fibrinogen. In some aspects, the collagen-binding domain comprises a human SLRP selected from lumican, decorin, biglycan, fibromodulin, chondroadherin, asporin, PRELP, osteoadherin/osteomodulin, opticin, osteoglycin/mimecan, podocan, perlecan, and nidogen. In some aspects, the SLRP is lumican. In some aspects, the lumican comprises the amino acid sequence as set forth in SEQ ID NO: 107. In other aspects, the collagen-binding domain is selected from LAIR1, LAIR2, and Glycoprotein IV. In some aspects, the collagen-binding domain is LAIR1. In some aspects, the collagen-binding domain comprises amino acid residues 22-122 of the amino acid sequence as set forth in SEQ ID NO: 98. In some embodiments, the LAIR1 is a variant comprising one or more amino acid substitutions, additions or deletions, optionally two, three, four, five, six, seven, eight, nine, ten or more amino acid substitutions, additions or deletions relative to a LAIR1 protein comprising the amino acid sequence of SEQ ID NO: 98. In some embodiment, the LAIR1 variant has increased binding affinity to collagen relative to a collagen binding affinity of a LAIR1 protein comprising the amino acid sequence of SEQ ID NO: 98. In other further embodiments, the LAIR1 variant has decreased binding affinity to collagen relative to a collagen binding affinity of a LAIR1 protein comprising the amino acid sequence of SEQ ID NO: 98.

[0048] In some aspects, the chemokine is selected from LIF, MIP-2, MIP-1α, MIP-1β, CXCL1, CXCL9, CXCL10, MCP-1, Eotaxin, RANTES, LIX, and a combination thereof. In some aspects, the chemokine is selected from CCL3, CCL4, CCL5, Eotaxin and a combination thereof.

[0049] In some aspects, the linker is of sufficient length or mass to reduce adsorption of the immunomodulatory domain onto collagen fibrils, and/or provides sufficient molecular weight to the fusion protein reduce diffusion from a tissue and/or allows for steric separation of the immunomodulatory domain from collagen fibrils to promote receptor/ligand engagement. In some aspects, the linker is human serum albumin or fragment thereof. In other aspects, the linker comprises an Fc domain or a mutant Fc domain with reduced FcR interaction.

[0050] In some aspects, the fusion protein is of sufficient mass to reduce size dependent escape by diffusion or convection upon administration in vivo. In some aspects, the fusion protein binds type I and/or type IV collagen upon administration in vivo, thereby reducing systemic exposure of the immunomodulatory fusion protein.

[0051] In yet other aspects, the disclosure provides an immunomodulatory fusion protein comprising:

[0052] (i) an agonist antibody which binds an activating ligand/receptor comprising an Fc domain or a mutant Fc domain with reduced FcR interaction; and

[0053] (ii) a collagen-binding domain, wherein the collagen-binding domain specifically binds type I and/or type IV collagen and binds type I collagen with a K_{D}≤500 nM, and wherein the collagen-binding domain has an isoelectric point pI<10 and a molecular weight (MW) of ≥5 kDa,

wherein the collagen-binding domain is operably linked to the C-terminus of the Fc domain or mutant Fc domain. In some aspects, the K_{D} of the collagen-binding domain for type I and/or type IV collagen is less than the K_{D} of the collagen-binding domain for an extracellular matrix component selected from fibronectin, vitronectin, osteopontin, tenascin C, or fibrinogen. In some aspects, the collagen-binding domain comprises a human SLRP selected from lumican, decorin, biglycan, fibromodulin, chondroadherin, asporin, PRELP, osteoadherin/osteomodulin, opticin, osteoglycin/mimecan, podocan, perlecan, and nidogen. In some aspects, the SLRP is lumican. In some aspects, the lumican comprises the amino acid sequence as set forth in SEQ ID NO: 107. In other aspects, the collagen-binding domain is selected from LAIR1, LAIR2, and Glycoprotein IV. In some aspects, the collagen-binding domain is LAIR1. In some aspects, the collagen-binding domain comprises amino acid residues 22-122 of the amino acid sequence as set forth in SEQ ID NO: 98. In some embodiments, the LAIR1 is a variant comprising one or more amino acid substitutions, additions or deletions, optionally two, three, four, five, six, seven, eight, nine, ten or more amino acid substitutions, additions or deletions relative to a LAIR1 protein comprising the amino acid sequence of SEQ ID NO: 98. In some embodiment, the LAIR1 variant has increased binding affinity to collagen relative to a collagen binding affinity of a LAIR1 protein comprising the amino acid sequence of SEQ ID NO: 98. In other further embodiments, the LAIR1 variant has decreased binding affinity to collagen relative to a collagen binding affinity of a LAIR1 protein comprising the amino acid sequence of SEQ ID NO: 98.

[0054] In some aspects, the agonist antibody is selected from an anti-TNFR1 antibody, an anti-TNFR2 antibody, an anti-CD40 antibody, an anti-4-1BB antibody and an anti-OX40 antibody. In other aspects, the agonist antibody is selected from an anti-ICOS antibody and an anti-CD28 antibody. In some aspects, the agonist antibody is selected from an anti-CD3γ antibody, an anti-CD3δ antibody, an anti-CD3ζ antibody, and an anti-CD3ε antibody.

[0055] In some aspects, the fusion protein is of sufficient mass to reduce size dependent escape by diffusion or convection upon administration in vivo. In some aspects, the fusion protein binds type I and/or type IV collagen upon administration in vivo, thereby reducing systemic exposure of the immunomodulatory fusion protein.

[0056] In further aspects, the disclosure provides an immunomodulatory fusion protein comprising:

[0057] (i) an antagonist antibody which binds an inhibitory ligand/receptor comprising an Fc domain or a mutant Fc domain with reduced FcR interaction; and

[0058] (ii) a collagen-binding domain, wherein the collagen-binding domain specifically binds type I and/or type IV collagen and binds type I collagen with a K_{D}≤500 nM, and wherein the collagen-binding domain has an isoelectric point pI<10 and a molecular weight (MW) of ≥5 kDa,

wherein the collagen-binding domain is operably linked to the C-terminus of the Fc domain or mutant Fc domain. In some aspects, the K_{D} of the collagen-binding domain for type I and/or type IV collagen is less than the K_{D} of the collagen-binding domain for an extracellular matrix component selected from fibronectin, vitronectin, osteopontin, tenascin C, or fibrinogen. In some aspects, the collagen-binding domain comprises a human SLRP selected from lumican, decorin, biglycan, fibromodulin, chondroadherin, asporin, PRELP, osteoadherin/osteomodulin, opticin, osteoglycin/mimecan, podocan, perlecan, and nidogen. In some aspects, the SLRP is lumican. In some aspects, the lumican comprises the amino acid sequence as set forth in SEQ ID NO: 107. In other aspects, the collagen-binding domain is selected from LAIR1, LAIR2, and Glycoprotein IV. In some aspects, the collagen-binding domain is LAIR1. In some aspects, the collagen-binding domain comprises amino acid residues 22-122 of the amino acid sequence as set forth in SEQ ID NO: 98. In some embodiments, the LAIR1 is a variant comprising one or more amino acid substitutions, additions or deletions, optionally two, three, four, five, six, seven, eight, nine, ten or more amino acid substitutions, additions or deletions relative to a LAIR1 protein comprising the amino acid sequence of SEQ ID NO: 98. In some embodiment, the LAIR1 variant has increased binding affinity to collagen relative to a collagen binding affinity of a LAIR1 protein comprising the amino acid sequence of SEQ ID NO: 98. In other further embodiments, the LAIR1 variant has decreased binding affinity to collagen relative to a collagen binding affinity of a LAIR1 protein comprising the amino acid sequence of SEQ ID NO: 98.

[0059] In some aspects, the antagonist antibody is selected from an anti-PD-1 antibody, an anti-PD-L1 antibody, an anti-PD-L2 antibody, an anti-CTLA4 antibody, an anti-TIGIT antibody, an anti-BTLA antibody, an anti-VISTA antibody, an anti-TIM-3 antibody, an anti-LAG-3 antibody, an anti-CD47 antibody, and an anti-SIRPα antibody.

[0060] In some aspects, the fusion protein is of sufficient mass to reduce size dependent escape by diffusion or convection upon administration in vivo. In some aspects, the fusion protein binds type I and/or type IV collagen upon administration in vivo, thereby reducing systemic exposure of the immunomodulatory fusion protein.

[0061] In other aspects, the disclosure provides an immunomodulatory fusion protein comprising:

[0062] (i) human IL-2;

[0063] (ii) human lumican, human LAIR1, or human LAIR1 variant; and

[0064] (iii) a linker, wherein the linker is a hydrophilic polypeptide comprising “N” amino acids in length, wherein N=I-1000, 10-900, 30-800, 40-700, 50-600, 100-500, or 200-400, wherein IL-2 is operably linked via the linker to lumican or LAIR1, and wherein the fusion protein is ≥60 kDa.

[0065] In further aspects, the disclosure provides an immunomodulatory fusion protein comprising:

[0066] (i) a single chain fusion of human IL-12(p35)/IL-12(p40);

[0067] (ii) human lumican, human LAIR1, or human LAIR1 variant; and

[0068] (iii) a linker, wherein the linker is a hydrophilic polypeptide comprising “N” amino acids in length, wherein N=1-1000, 10-900, 30-800, 40-700, 50-600, 100-500, or 200-400,

[0069] wherein the single chain fusion of IL-12(p35)/IL-12(p40) is operably linked via the linker to lumican or LAIR1, and wherein the fusion protein is ≥60 kDa.

[0070] In yet further aspects, the disclosure provides an immunomodulatory fusion protein comprising:

[0071] (i) human CCL-3;

[0072] (ii) human lumican, human LAIR1, or human LAIR1 variant; and

[0073] (iii) a linker, wherein the linker is a hydrophilic polypeptide comprising “N” amino acids in length, wherein N=1-1000, 10-900, 30-800, 40-700, 50-600, 100-500, or 200-400,

[0074] wherein CCL-3 is operably linked via the linker to lumican or LAIR1, and wherein the fusion protein is ≥60 kDa.

[0075] In other aspects, the disclosure provides an immunomodulatory fusion protein comprising:

[0076] (i) human CCL-4;

[0077] (ii) human lumican, human LAIR1, or human LAIR1 variant; and

[0078] (iii) a linker, wherein the linker is a hydrophilic polypeptide comprising “N” amino acids in length, wherein N=1-1000, 10-900, 30-800, 40-700, 50-600, 100-500, or 200-400,

[0079] wherein CCL-4 is operably linked via the linker to lumican or LAIR1, and wherein the fusion protein is ≥60 kDa.

[0080] In some aspects, the disclosure provides an immunomodulatory fusion protein comprising:

[0081] (i) human CCL-5;

[0082] (ii) human lumican, human LAIR1, or human LAIR1 variant; and

[0083] (iii) a linker, wherein the linker is a hydrophilic polypeptide comprising “N” amino acids in length, wherein N=1-1000, 10-900, 30-800, 40-700, 50-600, 100-500, or 200-400,

[0084] wherein CCL-5 is operably linked via the linker to lumican or LAIR1, and wherein the fusion protein is ≥60 kDa.

[0085] In other aspects, the disclosure provides an immunomodulatory fusion protein comprising:

[0086] (i) human Eotaxin;

[0087] (ii) human lumican, human LAIR1, or human LAIR1 variant; and

[0088] (iii) a linker, wherein the linker is a hydrophilic polypeptide comprising “N” amino acids in length, wherein N=1-1000, 10-900, 30-800, 40-700, 50-600, 100-500, or 200-400,

[0089] wherein Eotaxin is operably linked via the linker to lumican or LAIR1, and wherein the fusion protein is ≥60 kDa.

[0090] In any of the foregoing aspects, lumican comprises the amino acid sequence as set forth in SEQ ID NO: 107.

[0091] In any of the foregoing aspects, LAIR1 comprises the amino acid sequence as set forth in SEQ ID NO: 98. In some embodiments, the LAIR1 is a variant comprising one or more amino acid substitutions, additions or deletions, optionally two, three, four, five, six, seven, eight, nine, ten or more amino acid substitutions, additions or deletions relative to a LAIR1 protein comprising the amino acid sequence of SEQ ID NO: 98. In some embodiment, the LAIR1 variant has increased binding affinity to collagen relative to a collagen binding affinity of a LAIR1 protein comprising the amino acid sequence of SEQ ID NO: 98. In other further embodiments, the LAIR1 variant has decreased binding affinity to collagen relative to a collagen binding affinity of a LAIR1 protein comprising the amino acid sequence of SEQ ID NO: 98.

[0092] In any of the foregoing aspects, the linker is of sufficient length or mass to reduce adsorption of the immunomodulatory domain onto collagen fibrils, and/or provides sufficient molecular weight to the fusion protein reduce diffusion from a tissue and/or allows for steric separation of the immunomodulatory domain from collagen fibrils to promote receptor/ligand engagement. In some aspects, the linker is human serum albumin or fragment thereof. In other aspects, the linker comprises an Fc domain or a mutant Fc domain with reduced FcR interaction.

[0093] In some aspects, the fusion protein is of sufficient mass to reduce size dependent escape by diffusion or convection upon administration in vivo. In some aspects, the fusion protein binds type I and/or type IV collagen upon administration in vivo, thereby reducing systemic exposure of the immunomodulatory fusion protein.

[0094] In yet other aspects, the disclosure provides an immunomodulatory fusion protein comprising:

[0095] (i) an agonist antibody comprising an Fc domain or a mutant Fc domain with reduced FcR interaction, wherein the agonist antibody is selected from an anti-CD3 antibody, an anti-4-1-BB antibody, an anti-CD40 antibody and an anti-OX40 antibody; and

[0096] (ii) human lumican, human LAIR1, or human LAIR1 variant;

[0097] wherein lumican or LAIR1 is operably linked to the C-terminus of the Fc domain or mutant Fc domain.

[0098] In some aspects, the fusion protein is of sufficient mass to reduce size dependent escape by diffusion or convection upon administration in vivo. In some aspects, the fusion protein binds type I and/or type IV collagen upon administration in vivo, thereby reducing systemic exposure of the immunomodulatory fusion protein.

[0099] In some aspects, the disclosure provides a pharmaceutical composition comprising an immunomodulatory fusion protein disclosed herein, and a pharmaceutically acceptable carrier.

[0100] In other aspects, the disclosure provides a nucleotide sequence encoding an immunomodulatory fusion protein disclosed herein. In some aspects, the disclosure provides an expression vector comprising a nucleic acid disclosed herein. In other aspects, the disclosure provides a cell transformed with an expression vector disclosed herein.

[0101] In another aspects, the disclosure provides a method for producing an immunomodulatory fusion protein, the method comprising maintaining a cell described herein under conditions permitting expression of the immunomodulatory fusion protein. In further aspects, the method comprises obtaining the immunomodulatory fusion protein.

[0102] In other aspects, the disclosure provides a method for activating, enhancing or promoting a response by an immune cell in a subject, comprising administering to a subject in need thereof, an effective amount of an immunomodulatory fusion protein or pharmaceutical composition disclosed herein

[0103] In yet further aspects, the disclosure provides a method for inhibiting, reducing or suppressing a response by an immune cell in a subject, comprising administering to a subject in need thereof, an effective amount of an immunomodulatory fusion protein or pharmaceutical composition disclosed herein

[0104] In any of the foregoing aspects, the immune cell is a lymphoid cell selected from an innate lymphoid cell, a T cell, a B cell, an NK cell, and a combination thereof. In other aspects, the immune cell is a myeloid cell selected from a monocyte, a neutrophil, a granulocyte, a mast cell, a macrophage, a dendritic cell, and a combination thereof. In some aspects, the response by the immune cell comprises cytokine production, antibody production, production of antigen-specific immune cells, increased effector function and/or cytotoxicity, and a combination thereof. In some aspects, the immune cell occurs in a tumor microenvironment.

[0105] In other aspects, the disclosure provides a method for reducing or inhibiting tumor growth, comprising administering to a subject in need thereof, an effective amount an immunomodulatory fusion protein or pharmaceutical composition disclosed herein.

[0106] In further aspects, the disclosure provides a method for treating cancer in a subject, comprising administering to a subject in need thereof, an effective amount of an immunomodulatory fusion protein or pharmaceutical composition disclosed herein.

[0107] In any of the foregoing aspects, an anti-tumor immune response is induced in the subject after administration of the immunomodulatory fusion protein or the pharmaceutical composition. In some aspects, the anti-tumor immune response is a T cell response comprising the production of IFNγ and/or IL-2 by one or both of CD4+ T cells and CD8+ T cells.

[0108] In any of the foregoing aspects, infiltration of immune cells into a tumor microenvironment is increased after administration of the immunomodulatory fusion protein or the pharmaceutical composition.

[0109] In any of the foregoing aspects, the quantity of T regulatory (Treg) cells is reduced in a tumor microenvironment after administration of the immunomodulatory fusion protein or the pharmaceutical composition. In any of the foregoing aspects, T cell exhaustion is reduced in a tumor microenvironment after administration of the immunomodulatory fusion protein or the pharmaceutical composition.

[0110] In any of the foregoing aspects, the immunomodulatory fusion protein or pharmaceutical composition is administered intratumorally.

[0111] In any of the foregoing aspects, the immunomodulatory fusion protein or pharmaceutical composition is administered by viral vectors, electroporation, transplantation of cells expressing the immunomodulatory fusion protein, or replicons.

[0112] In other aspects, the disclosure provides a kit comprising a container comprising an immunomodulatory fusion protein described herein, and an optional pharmaceutically acceptable carrier, or a pharmaceutical composition described herein, and a package insert comprising instructions for administration of the fusion protein or pharmaceutical composition, for treating or delaying progression of cancer or reducing or inhibiting tumor growth in a subject in need thereof.

[0113] In yet further aspects, the disclosure provides a kit comprising a container comprising an immunomodulatory fusion protein described herein, and an optional pharmaceutically acceptable carrier, or a pharmaceutical composition described herein, and a package insert comprising instructions for administration of the antibody or pharmaceutical composition alone or in combination with another agent, for treating or delaying progression of cancer or reducing or inhibiting tumor growth in a subject in need thereof.

[0114] In some aspects, the disclosure provides use of an immunomodulatory fusion protein described herein, and an optional pharmaceutically acceptable carrier, or a pharmaceutical composition described herein, for the manufacture of a medicament for treating or delaying progression of cancer or reducing or inhibiting tumor growth in a subject in need thereof.

[0115] In other aspects, the disclosure provides an immunomodulatory fusion protein described herein, and an optional pharmaceutically acceptable carrier, or a pharmaceutical composition described herein, in the manufacture of a medicament for treating or delaying progression of cancer or reducing or inhibiting tumor growth in a subject in need thereof.

[0116] In yet further aspects, the disclosure provides an immunomodulatory fusion protein described herein, and an optional pharmaceutically acceptable carrier, or a pharmaceutical composition described herein, for use as a medicament.

[0117] In other aspects, the disclosure provides a method for reducing or inhibiting tumor growth or treating cancer in a subject, the method comprising administering to a subject in need thereof, an effective amount an immunomodulatory fusion protein or pharmaceutical composition described herein, and an effective amount of a second composition comprising a tumor antigen-targeting antibody, or antigen-binding fragment thereof, thereby reducing or inhibiting tumor growth or treating cancer in the subject. In some aspects, the tumor antigen is a tumor-associated antigen (TAA), a tumor-specific antigen (TSA), or a tumor neoantigen. In other aspects, the tumor antigen-targeting antibody specifically binds human HER-2/neu, EGFR, VEGFR, CD20, CD33, or CD38.

[0118] In yet other aspects, the disclosure provides a method for reducing or inhibiting tumor growth or treating cancer in a subject, the method comprising administering to a subject in need thereof, an effective amount an immunomodulatory fusion protein or pharmaceutical composition described herein, and an effective amount of a second composition comprising a cancer vaccine, thereby reducing or inhibiting tumor growth or treating cancer in the subject. In some aspects, the cancer vaccine is a population of cells immunized in vitro with a tumor antigen and administered to the subject. In other aspects, the cancer vaccine is a peptide comprising one or more tumor-associated antigens. In some aspects, cancer vaccine is an amphiphilic peptide conjugate comprising a tumor-associated antigen, a lipid, and optionally a linker, wherein the amphiphilic peptide conjugate binds albumin under physiological conditions. In some aspects, the cancer vaccine further comprises an adjuvant.

[0119] In some aspects, the disclosure provides a method for reducing or inhibiting tumor growth or treating cancer in a subject, the method comprising administering to a subject in need thereof, an effective amount an immunomodulatory fusion protein or pharmaceutical composition described herein, and an effective amount of a second composition comprising an immune checkpoint inhibitor, thereby reducing or inhibiting tumor growth or treating cancer in the subject. In some aspects, the immune checkpoint inhibitor comprises an antibody or antigen binding fragment thereof which binds PD-1, PD-L1, CTLA-4, LAG3, or TIM3.

[0120] In further aspects, the disclosure provides a method for reducing or inhibiting tumor growth or treating cancer in a subject, the method comprising administering to a subject in need thereof, an effective amount an immunomodulatory fusion protein or pharmaceutical composition described herein, and an effective amount of a second composition comprising an adoptive cell therapy, thereby reducing or inhibiting tumor growth or treating cancer in the subject. In some aspects, the adoptive cell therapy comprises an immune effector cell comprising a chimeric antigen receptor (CAR) molecule which binds to a tumor antigen. In some aspects, the CAR molecule comprises an antigen binding domain, a transmembrane domain, and an intracellular domain comprising a costimulatory domain and/or a primary signaling domain. In some aspects, the antigen binding domain binds to the tumor antigen associated with the disease. In some aspects, the tumor antigen is selected from CD19, EGFR, Her2/neu, CD30 and BCMA. In some aspects, the immune effector cell is a T cell, such as a CD8+ T cell. In some aspects, the immune effector cell is a natural killer (NK) cell.

[0121] In any of the foregoing methods, the immunomodulatory fusion protein or the pharmaceutical composition are administered intratumorally. In some aspects, the immunomodulatory fusion protein or the pharmaceutical composition and the second composition are administered concurrently or sequentially.

[0122] In other aspects, the disclosure provides a method for reducing or inhibiting tumor growth or treating cancer in a subject, the method comprising administering to a subject in need thereof, an effective amount of immunomodulatory fusion protein comprising:

[0123] (i) human IL-2;

[0124] (ii) human lumican, human LAIR1, or human LAIR1 variant; and

[0125] (iii) a linker, wherein the linker is a hydrophilic polypeptide comprising “N” amino acids in length, wherein N=1-1000, 10-900, 30-800, 40-700, 50-600, 100-500, or 200-400, wherein IL-2 is operably linked via the linker to lumican or LAIR1, and wherein the fusion protein is >60 kDa,

[0126] thereby reducing or inhibiting tumor growth or treating cancer in the subject.

[0127] In some aspects, the disclosure provides a method for reducing or inhibiting tumor growth or treating cancer in a subject, the method comprising administering to a subject in need thereof, an effective amount of an immunomodulatory fusion protein comprising:

[0128] (i) a single chain fusion of human IL-12(p35)/IL-12(p40);

[0129] (ii) human lumican, human LAIR1, or human LAIR1 variant; and

[0130] (iii) a linker, wherein the linker is a hydrophilic polypeptide comprising “N” amino acids in length, wherein N=1-1000, 10-900, 30-800, 40-700, 50-600, 100-500, or 200-400,

wherein the single chain fusion of IL-12(p35)/IL-12(p40) is operably linked via the linker to lumican or LAIR1, and wherein the fusion protein is >60 kDa,

[0131] thereby reducing or inhibiting tumor growth or treating cancer in the subject.

[0132] In some aspects, the disclosure provides a method for reducing or inhibiting tumor growth or treating cancer in a subject, the method comprising administering to a subject in need thereof, an effective amount of a first composition comprising an immunomodulatory fusion protein comprising:

[0133] (i) human IL-2;

[0134] (ii) human lumican, human LAIR1, or human LAIR1 variant; and

[0135] (iii) a linker, wherein the linker is a hydrophilic polypeptide comprising “N” amino acids in length, wherein N=1-1000, 10-900, 30-800, 40-700, 50-600, 100-500, or 200-400,

wherein IL-2 is operably linked via the linker to lumican or LAIR1, and wherein the fusion protein is >60 kDa, and a second composition comprising an effective amount of an immunomodulatory fusion protein comprising:

[0136] (i) a single chain fusion of human IL-12(p35)/IL-12(p40);

[0137] (ii) human lumican, human LAIR1, or; and

[0138] (iii) a linker, wherein the linker is a hydrophilic polypeptide comprising “N” amino acids in length, wherein N=1-1000, 10-900, 30-800, 40-700, 50-600, 100-500, or 200-400,

wherein the single chain fusion of IL-12(p35)/IL-12(p40) is operably linked via the linker to lumican or LAIR1, and wherein the fusion protein is >60 kDa,

[0139] thereby reducing or inhibiting tumor growth or treating cancer in the subject.

[0140] In some aspects, the method further comprises administering a second (or third, or fourth) composition comprising an effective amount of a tumor antigen-targeting antibody, or antigen-binding fragment thereof. In other aspects, the method further comprises administering a second composition comprising an effective amount of composition comprising a cancer vaccine. In yet other aspects, the method further comprises administering a second composition comprising an effective amount of a second composition comprising an immune checkpoint inhibitor. In some aspects, the immune checkpoint inhibitor comprises an antibody or antigen binding fragment thereof which binds PD-1, PD-L1, CTLA-4, LAG3, or TIM3.

[0141] In another aspects, the method further comprises administering a second composition comprising an effective amount of a second composition comprising an adoptive cell therapy, thereby reducing or inhibiting tumor growth or treating cancer in the subject. In some aspects, the adoptive cell therapy comprises an immune effector cell comprising a chimeric antigen receptor (CAR) molecule which binds to a tumor antigen. In some aspects, the immune effector cell is a T cell, such as a CD8+ T cell or an NK cell.

[0142] In any of the foregoing aspects, the immunomodulatory fusion protein or the pharmaceutical composition are administered intratumorally.

[0143] In any of the foregoing aspects, the immunomodulatory fusion protein or the pharmaceutical composition and the second composition are administered concurrently or sequentially.

### BRIEF DESCRIPTIONS OF THE FIGURES

[0144] FIG. 1A provides a graph showing the binding of Gaussia luciferase alone (Gluc) or fused to collagen-binding polypeptides (Lumican-Gluc, ColG s3a/s3b-Gluc, ColH s3-Gluc) to collagen type I as a function of concentration. Binding was determined by ELISA.

[0145] FIG. 1B provides a graph showing the binding of Gaussia luciferase alone (Gluc) or fused to collagen-binding polypeptides (Lumican-Gluc, ColG s3a/s3b-Gluc, ColH s3-Gluc) to collagen type IV as a function of concentration. Binding was determined by ELISA.

[0146] FIG. 1C provides a graph showing the binding of His-tagged murine LAIR-1 (mLAIR1-His) and His-tagged biotinylated lumican (Lwt-HIS-b) to collagen type I as a function of concentration. Binding was determined by ELISA using an anti-HIS antibody conjugated to horseradish peroxidase (HRP).

[0147] FIG. 1D provides a graph showing the competitive binding between His-tagged murine LAIR-1 (mLAIR1) and His-tagged biotinylated lumican to collagen type I as a function of mLAIR1 concentration. Lumican binding to collagen type I was determined by competition ELISA in the presence of varying concentrations of mLAIR1 using Streptavidin conjugated to horseradish perioxidate (HRP).

[0148] FIG. 2A provides a graph quantifying relative tumor fluorescence over time of fluorescently-labeled lumican or lumican-MSA compared to fluorescently-labeled MSA following intratumoral injection in B16F10-Trp2KO tumors as determined by in vivo fluorescence imaging.

[0149] FIG. 2B provides a graph quantifying fluorescence of serum from B16F10-Trp2KO tumor-bearing mice injected with fluorescently-labeled lumican-MSA or fluorescently-labeled MSA as a percentage of injected dose. Serum fluorescence was determined by fluorescent imaging of micro-hematocrit heparin-coated tubes containing mouse blood samples.

[0150] FIG. 3A provides a Mantel-Cox survival curve of B16F10 melanoma tumor-bearing mice treated with PBS (control) (i.tu.), MSA-IL2 (i.tu.), Lumican-MSA-IL2 (i.tu.), or Lumican (i.tu.). Mice (n=5 or 7 per treatment group) were treated as indicated (arrows) on day 6 and 12. Survival statistics determined by log-rank Mantel-Cox test. Significance indicated with **(P<0.002).

[0151] FIG. 3B provides a Mantel-Cox survival curve of B16F10 melanoma tumor-bearing mice treated intratumorally with PBS (n=7, i.tu.), anti-TYRP1 antibody (TA99) (i.p.) in combination with MSA-IL2 (n=17, i.tu.), Lumican-MSA-IL2 (n=17, i.tu.), or with Lumican (n=17, i.tu.). Mice were treated as indicated (arrows) on day 6, 12 and 18. Survival statistics determined by log-rank Mantel-Cox test. Significance indicated with *(P<0.03), **(P<0.002), ***(P<0.0002), ****(P<0.0001), n.s., not significant.

[0152] FIG. 3C provides a Mantel-Cox survival curve B16F10 melanoma tumor-bearing mice treated with PBS (control) (i.tu.) or with a combination of anti-TYRP1 antibody (TA99) (i.p.) and Lumican-MSA-IL2 administered intratumorally (i.tu.), peritumorally (peri.tu) (i.e. adjacent to the tumor), or subcutaneously near the base of the tail (s.c. tail base) Mice were treated as indicated (arrows) on day 6, 12 and 18. Survival statistics determined by log-rank Mantel-Cox test. Significance indicated with *(P<0.03), **(P<0.002), ***(P<0.0002), ****(P<0.0001), n.s., not significant.

[0153] FIG. 3D provides a Mantel-Cox survival curve of B16F10 melanoma tumor-bearing mice treated with PBS (control) both (i.tu.) and into the inguinal tumor draining lymph node (i.tdLN), with anti-TYRP1 antibody (TA99) (i.p) in combination with Lumican-MSA-IL2 (i.tu.) and PBS (i.tdLN), or with anti-TYRP1 antibody (TA99) (i.p) in combination with Lumican-MSA-IL2 (i.tdLN) and PBS (i.tu). Mice (n=7 per treatment group) were treated as indicated (arrows) on day 6 and day 12. Survival statistics determined by log-rank Mantel-Cox test. Significance indicated with **(P<0.002).

[0154] FIG. 4 provides a Mantel-Cox survival curve of B16F10 melanoma tumor-bearing BatF3^{-/-} or wild-type (WT) mice treated with PBS (control) (i.tu.) or anti-TYRP1 antibody (TA99) (i.p.) in combination with Lumican-MSA-IL2 (i.tu) and immune cell depleting or cytokine neutralizing antibodies as indicated. Mice (n=5 per treatment group) were treated as indicated on day 6, 12 and 18. Survival statistics determined by log-rank Mantel-Cox test. Significance indicated with *(P<0.03), **(P<0.002), ***(P<0.0002), ****(P<0.0001), n.s., not significant.

[0155] FIG. 5A provides a graph quantifying IFNγ+ cells among live CD45+CD3+CD8+ T cells derived from splenocytes, excised on day 10 of mice (treated as described in FIG. 3B), stimulated with irradiated B16F10 or 4T1 cells for 12 hours in the presence of brefeldin A and subsequently stained for surface markers and intracellular IFNγ (n=5 mice per treatment group). Data analyzed by one-way ANOVA with Tukey's multiple comparison test.

[0156] FIG. 5B provides a graph quantifying mean tumor areas of the contralateral (untreated) (left panel) and ipsilateral (treated) (middle panel) lesions from B16F10 melanoma tumor-bearing mice treated and percent survival (right panel) monitored over time (n=7/group). Mice were inoculated with B16F10 cells on the right flank (ipsilateral) and with B16F10 cells on the left flank (contralateral) on day 0. Intratumoral treatments were administered to the ipsilateral tumor alongside TA99 (i.p.) on day 6 and day 12. Tumor area (mean+S.D.) of the contralateral (untreated) and ipsilateral (treated) lesions (left) and survival (right) monitored over time (n=7/group). For each group, tumor area shown until a mouse reaches the euthanasia criterion. Survival statistics determined by log-rank Mantel-Cox test. Significance assumed with *, P<0.03; **, P<0.002; ***, P<0.0002; ****, P<0.0001; n.s., not significant.

[0157] FIG. 6A provides a graph quantifying weight change of B16F10 melanoma tumor-bearing mice after treatment with PBS (i.tu.) (n=6), lumican (i.tu.) (n=7), IL12-MSA (i.tu.) (n=7), IL12-MSA-Lumican (i.tu.) (n=7), or IL12-MSA (i.p.) (n=7). Mice were treated as indicated (arrows) on day 6 and day 12.

[0158] FIG. 6B provides a survival curve for mice inoculated with B16F10 melanoma tumors on day 0 and treated with PBS (control), lumican (i.tu.), IL12-MSA (i.tu), IL12-MSA (i.p.) or IL12-MSA-Lumican (i.tu) on days 6 and 12.

[0159] FIG. 7 provides graphs depicting weight change from baseline (left panel) and corresponding survival over time (right panel) of B16F10 tumor-bearing mice treated with intratumoral (i.tu.) injections of PBS (n=5), MSA-IL2 and IL12-MSA (n=5), or Lumican-MSA-IL2 and IL12-MSA-Lumican (n=5) on day 5 and day 11. Arrows indicate time of treatment. Survival statistics determined by log-rank Mantel-Cox test. Significance indicated with *(P<0.03), **(P<0.002), ***(P<0.0002), ****(P<0.0001), n.s., not significant. FIG. 8A provides a Mantel-Cox survival curve of B16F10 melanoma tumor-bearing BatF3^{-/-} or wild-type (WT) mice treated with PBS (control) (i.tu.) or Lumican-MSA-IL2 (i.tu.) in combination with IL12-MSA-Lumican (i.tu.) and immune cell depleting or cytokine neutralizing antibodies as indicated. Mice (n=5 per treatment group) were treated as indicated on day 6, 12 and 18. Survival statistics determined by log-rank Mantel-Cox test. Significance indicated with *(P<0.03), **(P<0.002), ***(P<0.0002), ****(P<0.0001), n.s., not significant.

[0160] FIG. 8B provides a Mantel-Cox survival curve of B16F10 melanoma tumor-bearing BatF3−/− or wild-type (WT) mice treated with PBS (control) (i.tu.) or Lumican-MSA-IL2 (i.tu.) in combination with IL12-MSA-Lumican (i.tu.) and immune cell depleting antibodies as indicated. Mice (n=5 per treatment group) were treated as indicated on day 6, 12 and 18. Survival statistics determined by log-rank Mantel-Cox test. Significance indicated with *(P<0.03), **(P<0.002), ***(P<0.0002), ****(P<0.0001), n.s., not significant.

[0161] FIG. 8C provides a heat map showing the fold change of immune cells in tumor infiltrates from B16F10 melanoma tumor-bearing mice treated intratumorally with a combination of IL12-MSA-Lumican and Lumican-MSA-IL2 (Lumican versions) or a combination of IL12-MSA+MSA-IL2 (MSA versions) of relative to treatment with PBS.

[0162] FIGS. 8D-8E provide graphs quantifying tumor-infiltrating CD8+ T cells isolated from B16F10 melanoma tumor-bearing mice on day 11 post-tumor cell injection (FIG. 8D) and their corresponding median fluorescence intensity (MFI) of surface PD-1 (FIG. 8E), after treatment as in FIG. 8C on day 5 post-tumor cell injection.

[0163] FIG. 9 provides graphs depicting weight change from baseline (left panel) and corresponding survival over time (right panel) of B16F10 melanoma tumor-bearing mice treated with intratumoral (i.tu.) injections of PBS (n=5), anti-PD-1 antibody in combination with MSA-IL2 and IL12-MSA (n=5), or anti-PD-1 antibody in combination with Lumican-MSA-IL2 and IL12-MSA-Lumican (n=5) on day 5 and day 11. Arrows indicate time of treatment. Weight change and comparison statistics determined by one-way ANOVA with Tukey's multiple comparison test. Survival statistics determined by log-rank Mantel-Cox test. Significance indicated with *(P<0.03), **(P<0.002), ***(P<0.0002), ****(P<0.0001), n.s., not significant.

[0164] FIGS. 10A-10B provides a graph depicting tumor area (left panel) and percent survival (right panel) of EMT6 tumor-bearing mice (FIG. 10A) or MC38 tumor-bearing mice (FIG. 10B) and treated as indicated (arrows) on day 5, 11, and 17 as indicated (arrows). Weight change and comparison statistics determined by one-way ANOVA with Tukey's multiple comparison test. Survival statistics determined by log-rank Mantel-Cox test. Significance indicated with *, P<0.03; **, P<0.002; ***, P<0.0002; ****, P<0.0001; n.s., not significant.

[0165] FIG. 11 provides graphs depicting weight change from baseline (left, mean+S.D.), corresponding tumor area (middle, mean+S.D.) and survival (right) of B16F10 melanoma tumor-bearing mice treated with intratumoral (i.tu.) injections of PBS (n=12) or IL-12 (n=10 for IL12-MSA; n=10 for IL12-MSA-Lumican), or cancer vaccine (n=7) alone, or cancer vaccine and IL12 (n=7 for IL12-MSA; n=7 for IL12-MSA-Lumican) on days 5, 11 and 17 as indicated (arrows). Tumor area shown until a mouse reaches the euthanasia criterion (>100 mm²). Weight change statistics, shown within plot, determined by one-way ANOVA with Tukey's multiple comparison test. Survival statistics, adjacent to the legend, determined by log-rank Mantel-Cox test. Significance assumed with *, P<0.03; **, P<0.002; ***, P<0.0002; ****, P<0.0001; n.s., not significant

[0166] FIG. 12 provides graphs depicting weight change from baseline (left, mean+S.D.), corresponding tumor area (middle, mean+S.D.) and percent survival (right) of B16F10 melanoma tumor-bearing mice treated with intratumoral (i.tu.) injections of PBS (n=11) or IL-12 (n=9 for IL12-MSA; n=5 for IL12-MSA-Lumican), or CAR-T (n=11) alone, or CAR-T and IL12 (n=9 for IL12-MSA; n=5 for IL12-MSA-Lumican) on days 5 and 11 as indicated (arrows). Mice were inoculated with B16F10 cells on day 0 and lymphodepleted by total body irradiation on day 4. CAR-T treatments were administered in a single bolus tail vein injection (i.v.) on day 5. Tumor area shown until a mouse reaches the euthanasia criterion (>100 mm²). Weight change statistics, shown within plot, determined by one-way ANOVA with Tukey's multiple comparison test. Survival statistics, adjacent to the legend, determined by log-rank Mantel-Cox test. Significance assumed with *, P<0.03; **, P<0.002; ***, P<0.0002; ****, P<0.0001; n.s., not significant

[0167] FIG. 13 provides graphs depicting total body weight change during neoadjuvant treatment (left), primary tumor growth and weight (middle) and survival (right) of 4T1 mammary carcinoma tumor-bearing mice treated with intratumoral (i.tu.) injections of IL-12 (n=5 for IL12; n=5 for IL12-MSA-Lumican) and intraperitoneal (i.p.) injection of anti-PD-1 on day 7 and 13. Arrows indicate time of treatment and cross indicates time of surgery. Mice were inoculated 4T1-Luc cells in the mammary fat pad on day 0. Neoadjuvant therapy was administered on day 7 and 13 and the primary tumors was surgically excised on day 16. Post-operation mice were monitored by in vivo imaging (IVIS) for metastases. For each group, tumor area shown until the primary tumor is excised. Weight change statistics, shown within plot, determined by one-way ANOVA with Tukey's multiple comparison test. Survival statistics, adjacent to the legend, determined by log-rank Mantel-Cox test. Significance assumed with *, P<0.03; **, P<0.002; ***, P<0.0002; ****, P<0.0001; n.s., not significant

[0168] FIG. 14A provides a graph depicting mean tumor area of 4T1 mammary carcinoma tumor-bearing mice treated intratumorally with Lumican-GLuc or a combination of Lumican-CCL3, Lumican-CCL4 and Lumican-CCL on day 7 and day 13. Administration of IFNα intraperitoneally occurred on day 9 and day 15. Tumor growth (mean+SEM) monitored over time every other day.

[0169] FIG. 14B provides a graph depicting mean tumor area of B16F10 melanoma tumor-bearing mice treated intratumorally with Lumican-GLuc or a combination of Lumican-CCL3, Lumican-CCL4 and Lumican-CCL5 on day 7 and day 13. Administration of IFNα intraperitoneally on day 9 and day 15. Tumor growth (mean+SEM) monitored over time every other day.

[0170] FIG. 14C provides a graph depicting the effect of various concentrations of fusion proteins Lumican-GLuc (Lum GLuc), Lumican-CCL3 (Lum CCL3), Lumican-CCL5 (Lum CCL5) on the proliferation of 4T1 breast tumor cells in vitro. Proliferation was determined by measurement of WST-1 proliferation reagent by absorbance at 450 nm.

[0171] FIG. 14D provides a graph depicting the effect of various concentrations of fusion proteins Lumican-GLuc (Lum GLuc), Lumican-CCL3 (Lum CCL3), Lumican-CCL5 (Lum CCL5) on the proliferation of B16F10 melanoma tumor cells in vitro. Proliferation was determined by measurement of WST-1 proliferation reagent by absorbance at 450 nm.

[0172] FIG. 15 provides a graph depicting mean tumor areas of tumor lesions in B16F10 melanoma tumor-bearing mice treated with a cancer vaccine administered subcutaneously (s.c.) at the tail base with a prime on day 5 and boosts on day 11 and 17 post-tumor cell injection. Cancer vaccine was administered alone or in combination with CCL11-lumican, TNFα, IFNγ, or Lumican, as indicated, administered intratumorally on days 11, 17, 23, and 29. Tumor area (mean+SD) was measured over time every other day.

[0173] FIGS. 16A-16B provides a graph depicting individual tumor areas of tumor lesions in B16F10 melanoma tumor-bearing mice treated with a tumor-targeting antibody 2.5F-Fc (i.p.) and MSA-IL2 (i.p.) on days 5, 11, and 17 post-tumor cell injection in combination with either lumican (Lwt) (i.tu.) (FIG. 16B) or CCL11-lumican (11L) (i.tu.) (FIG. 16A) administered on days 5 and 11. Tumor area monitored over time every other day.

[0174] FIG. 17A provides a graph showing the binding of agonist antibody-lumican fusion proteins to collagen type I as a function of concentration. Binding was determined by ELISA.

[0175] FIG. 17B provides a graph quantifying the in vivo fluorescence of a mouse anti-FITC antibody (4420) alone or fused to Lumican fluorescently-labeled with Alexa Fluor® 647 after intratumoral injection into 4T1 tumors of mic over time as determined by in vivo fluorescence imaging. Measurement of in vivo fluorescence is provided in units of total radiant efficiency (p/s)/(μW/cm2).

[0176] FIG. 18A provides a graph showing the binding of a subset of His-tagged lumican-IgG binding fusion proteins, as indicated, to collagen type I (left panel) or collagen IV (right panel) as a function of concentration. Binding was determined by ELISA.

[0177] FIG. 18B provides a graph depicting the binding of His-tagged lumican-IgG binding fusion proteins to mouse IgG2a isotype control (Clone C1.18.4) as a function of concentration. Binding was determined by ELISA. Anti-His (Clone ab1187) was used to detect each construct.

[0178] FIG. 19 provides 3D microscopy images of mouse omental tissue from OVCA433 human ovarian tumor-bearing mice showing specific accumulation of Alexa Fluor 647-labeled lumican (yellow) around RFP-expressing OVCA433 human ovarian tumor cell microcolonies (Red) in the mouse omental tissue, with collagen imaged by SHG microscopy in grey. Labeled lumican was injected intraperitoneally in tumor-bearing mice.

[0179] FIG. 20A provides graphs depicting the expression of IL-12 fusion proteins alone or fused to a fluorescent protein (mCherry), as indicated, from a self-replicating RNA in B16F10 cells as determined by flow cytometry.

[0180] FIG. 20B provides a graph depicting the expression of IL-12 fusion proteins alone or fused to a fluorescent protein (mCherry), as indicted, from a self-replicating RNA in B16F10 cells as determined by an IL-12 ELISA.

[0181] FIG. 21A provides a graph showing tumor volume (mean+SD) of tumor-bearing mice treated either with an intratumoral injection of PBS (n=4) or with intratumoral collagen-anchoring cytokines Lumican-MSA-IL2 and IL12-MSA-Lumican and intraperitoneal TA99 and anti-PD-1 (n=5) on days 25, 31, 37, 43, 49, 55, and 61. For each group, tumor volume shown until a mouse reaches the euthanasia criterion (>1200 mm³).

[0182] FIG. 21B provides a Mantel-Cox survival curve of tumor-bearing mice treated with intratumoral PBS (n=10), with intratumoral Lumican-MSA-IL2 and IL12-MSA-Lumican and intraperitoneal TA99 and anti-PD-1 (n=14), with intratumoral Lumican-MSA-IL2 and IL12-MSA-Lumican and intraperitoneal anti-PD-1 (n=10), with intratumoral MSA-IL2 and IL12-MSA and intraperitoneal TA99 and anti-PD-1 (n=9), or with intratumoral MSA-IL2 and IL12-MSA and intraperitoneal anti-PD-1 (n=8) on days 25, 31, 37, 43, 49, 55, and 61. Arrowheads indicate times of treatment. Overall survival graph enumerates mice that succumbed to tumor burden (>1200 mm³) or to treatment-related weight loss (>20%); the latter is indicated by a blue “x” for each mouse. Survival was compared by log-rank Mantel-Cox test. *P<0.03, ***P<0.0002, ****P<0.0001.

[0183] FIG. 22A provides a schematic for measuring LAIR binding capacity in B16F10 tumors.

[0184] FIG. 22B provides a graph showing the weight of an excised tumor and its extracellular matrix.

[0185] FIG. 22C provides a graph showing the hydroxyproline content of the B16F10 cell fraction compared to matrix fraction.

[0186] FIG. 22D provides a graph showing depletion of LAIR-fluorescence as a B16F10 derived-matrix fraction was placed in a 1 mL of AF647-labeled LAIR.

[0187] FIG. 22E provides a graph showing the correlation between the matrix fraction hydroxyproline content and the LAIR-binding capacity of B16F10-derived matrix fraction.

[0188] FIG. 23A provides a graph showing tumor area of B16F10 melanoma tumors (1×10⁶ cells inoculated on day 0) treated with PBS control (i.tu) (n=5) or LAIR-MSA-IL2 (i.tu) TA99 (i.p.) (n=7) on days 6, and 13.

[0189] FIG. 23B provides a Mantel-Cox survival curve of B16F10 melanoma tumor-bearing mice (1×10⁶ cells inoculated on day 0) treated with PBS control (i.tu) (n=5) or LAIR-MSA-IL2 (i.tu)+TA99 (i.p.) (n=7) on days 6 and 13.

[0190] FIG. 24A provides a sequence alignment of low affinity collagen binders, LAIR. 30.w.A, LAIR.30.w.B, LAIR.30.w.C, and LAIR.30.w. D, compared to wild-type LAIR (LAIR).

[0191] FIGS. 24B-E provide depictions of the crystal structures of wild-type LAIR (PDB 4ETY) shown as a gray ribbon, with selected mutated amino acid residues of low affinity collagen binders, LAIR.30.w.A (FIG. 24B), LAIR.30.w.B (FIG. 24C), LAIR.30.w.C (FIG. 24D), and LAIR.30.d. D (FIG. 24E), highlighted as bonded spheres.

[0192] FIG. 24F provides a graph showing binding of WT LAIR, WT LAIR-MSA, MSA-IL-2 (non-specific binding control), and mutant LAIR-MSA fusions to collagen type 1 in an ELISA assay (n=2). The binding-affinity (Kd) of each LAIR construct, calculated on a non-linear one-site binding fit, is also shown.

[0193] FIG. 25A provides a sequence alignment of low affinity collagen binders, LAIR.30.w.E and LAIR.30.w.F compared to wild-type LAIR.

[0194] FIGS. 25B-C provide depictions of the crystal structures of wild-type LAIR (PDB 4ETY) shown as a gray ribbon, with selected mutated amino acid residues of low affinity collagen binders, LAIR.30.w.E (FIG. 25B) and LAIR.30.w. F (FIG. 25C), highlighted as bonded spheres.

[0195] FIG. 25D provides a graph showing binding of WT LAIR, WT LAIR-MSA, MSA-IL-2 (non-specific binding control), and mutant LAIR-MSA fusions to collagen type 1 in an ELISA assay (n=2). The binding-affinity (Kd) of each LAIR construct, modeled on a non-linear one-site binding fit, is also shown.

[0196] FIG. 26A provides a sequence alignment of high affinity collagen binder, LAIR.30.2.K1.B, compared to wild-type LAIR.

[0197] FIG. 26B provides a depiction of the crystal structure of wild-type LAIR (PDB 4ETY) shown as a gray ribbon, with selected mutated amino acid residues of high affinity collagen binder, LAIR.30.2.K1.B, highlighted as bonded spheres.

[0198] FIGS. 26C-D provide flow cytometry plots showing CRP-XL-biotin binding (Strepravidin-AF647) versus protein display (goat anti-chicken AF488) of yeast bearing wild-type LAIR (black) or LAIR30.2.K1.B (cyan) incubated in either 100 nM (FIG. 26C) or 0.01 nM (FIG. 26D) of CRP-XL-biotin.

[0199] FIGS. 26E-F provide flow cytometry plots showing remaining surface CRP-XL-biotin signal (Streptatividn-AF647) versus protein display (goat anti-chicken AF488) of yeast bearing LAIR30.2.K1.B (FIG. 26E) or wild-type LAIR (FIG. 26F) at different time points (0 hours, 16 hours and 40 hours of competition) after competition with an excess of non-biotinylated CRP-XL.

[0200] FIG. 26G provides a graph showing the median fluorescence intensity of bound CRP-XL-biotin over time in the kinetic dissociation experiment depicted in FIGS. 26E-F. The estimated off-rates, modeled on a one-phase exponential decay fit, are also shown.

### DETAILED DESCRIPTION

[0201] Provided herein are immunomodulatory fusion proteins comprising an immunomodulatory domain operably linked to a collagen-binding domain. Such fusion proteins localize the immunomodulatory domain (e.g., cytokine, antibody), such that it is not systemically disseminated. Systemic dissemination of an immunomodulatory domain can result in reduced efficacy due to rapid clearance from the site of interest (e.g., tumor), and/or toxicity due to effects on non-target cells outside the tumor. Accordingly, the linking of an immunomodulatory domain to a collagen-binding protein localizes the immunomodulatory domain to prevent systemic dissemination, thereby maintaining the immunomodulatory domain at the site of interest and reducing potential off-target effects that could lead to toxicity.

### Definitions

[0202] Terms used in the claims and specification are defined as set forth below unless otherwise specified. In the case of direct conflict with a term used in a parent provisional patent application, the term used in the instant application shall control.

[0203] It must be noted that, as used in the specification and the appended claims, the singular forms “a,” “an” and “the” include plural referents unless the context clearly dictates otherwise.

[0204] As used herein, “about” will be understood by persons of ordinary skill and will vary to some extent depending on the context in which it is used. If there are uses of the term which are not clear to persons of ordinary skill given the context in which it is used, “about” will mean up to plus or minus 10% of the particular value.

[0205] As used herein, the term “agonist” refers to any molecule (e.g., an antibody or antigen binding fragment thereof) that partially or fully promotes, increases, or activates a biological activity of a native polypeptide disclosed herein. Suitable agonist molecules specifically include agonist antibodies or antibody fragments, fragments or amino acid sequence variants of native polypeptides, peptides, antisense oligonucleotides, small organic molecules, etc. In some embodiments, activation in the presence of the agonist is observed in a dose-dependent manner. In some embodiments, the measured signal (e.g., biological activity) is at least about 5%, at least about 10%, at least about 15%, at least about 20%, at least about 25%, at least about 30%, at least about 35%, at least about 40%, at least about 45%, at least about 50%, at least about 55%, at least about 60%, at least about 65%, at least about 70%, at least about 75%, at least about 80%, at least about 85%, at least about 90%, at least about 95%, or at least about 100% higher than the signal measured with a negative control under comparable conditions. Also disclosed herein, are methods of identifying agonists suitable for use in the methods of the disclosure. For example, these methods include, but are not limited to, binding assays such as enzyme-linked immuno-absorbent assay (ELISA), Forte Bio© systems, and radioimmunoassay (RIA). These assays determine the ability of an agonist to bind the polypeptide of interest (e.g., a receptor or ligand) and therefore indicate the ability of the agonist to promote, increase or activate the activity of the polypeptide. Efficacy of an agonist can also be determined using functional assays, such as the ability of an agonist to activate or promote the function of the polypeptide. For example, a functional assay may comprise contacting a polypeptide with a candidate agonist molecule and measuring a detectable change in one or more biological activities normally associated with the polypeptide. The potency of an agonist is usually defined by its EC₅₀ value (concentration required to activate 50% of the agonist response). The lower the EC₅₀ value the greater the potency of the agonist and the lower the concentration that is required to activate the maximum biological response.

[0206] The term “albumin” refers to a protein having the same, or very similar three dimensional structure as human albumin (SEQ ID NO: 42) and having a long serum half-life. Exemplary albumin proteins include human serum albumin (HSA; SEQ ID NOs: 42 and 43), primate serum albumin (such as chimpanzee serum albumin), gorilla serum albumin or macaque serum albumin, rodent serum albumin (such as hamster serum albumin), guinea pig serum albumin, mouse serum albumin and rat serum albumin, bovine serum albumin (such as cow serum albumin), equine serum albumin (such as horse serum albumin or donkey serum albumin), rabbit serum albumin, goat serum albumin, sheep serum albumin, dog serum albumin, chicken serum albumin and pig serum albumin.

[0207] The term “ameliorating” refers to any therapeutically beneficial result in the treatment of a disease state, e.g., cancer, including prophylaxis, lessening in the severity or progression, remission, or cure thereof.

[0208] “Amino acid” refers to naturally occurring and synthetic amino acids, as well as amino acid analogs and amino acid mimetics that function in a manner similar to the naturally occurring amino acids. Naturally occurring amino acids are those encoded by the genetic code, as well as those amino acids that are later modified, e.g., hydroxyproline, γ-carboxyglutamate, and 0-phosphoserine. Amino acid analogs refers to compounds that have the same basic chemical structure as a naturally occurring amino acid, i.e., an a carbon that is bound to a hydrogen, a carboxyl group, an amino group, and an R group, e.g., homoserine, norleucine, methionine sulfoxide, methionine methyl sulfonium. Such analogs have modified R groups {e.g., norleucine) or modified peptide backbones, but retain the same basic chemical structure as a naturally occurring amino acid. Amino acid mimetics refers to chemical compounds that have a structure that is different from the general chemical structure of an amino acid, but that function in a manner similar to a naturally occurring amino acid.

[0209] Amino acids can be referred to herein by either their commonly known three letter symbols or by the one-letter symbols recommended by the IUPAC-IUB Biochemical Nomenclature Commission. Nucleotides, likewise, can be referred to by their commonly accepted single-letter codes.

[0210] An “amino acid substitution” refers to the replacement of at least one existing amino acid residue in a predetermined amino acid sequence (an amino acid sequence of a starting polypeptide) with a second, different “replacement” amino acid residue. An “amino acid insertion” refers to the incorporation of at least one additional amino acid into a predetermined amino acid sequence. While the insertion will usually consist of the insertion of one or two amino acid residues, larger “peptide insertions,” can also be made, e.g. insertion of about three to about five or even up to about ten, fifteen, or twenty amino acid residues. The inserted residue(s) may be naturally occurring or non-naturally occurring as disclosed above. An “amino acid deletion” refers to the removal of at least one amino acid residue from a predetermined amino acid sequence.

[0211] As used herein, the term “antagonist” refers to any molecule (e.g., antibody or antigen-binding fragment thereof) that partially or fully blocks, inhibits, or neutralizes a biological activity of a native polypeptide disclosed herein. Suitable antagonist molecules specifically include antagonist antibodies or antibody fragments, fragments or amino acid sequence variants of native polypeptides, peptides, antisense oligonucleotides, small organic molecules, etc. In some embodiments, inhibition in the presence of the antagonist is observed in a dose-dependent manner. In some embodiments, the measured signal (e.g., biological activity) is at least about 5%, at least about 10%, at least about 15%, at least about 20%, at least about 25%, at least about 30%, at least about 35%, at least about 40%, at least about 45%, at least about 50%, at least about 55%, at least about 60%, at least about 65%, at least about 70%, at least about 75%, at least about 80%, at least about 85%, at least about 90%, at least about 95%, or at least about 100% lower than the signal measured with a negative control under comparable conditions. Also disclosed herein, are methods of identifying antagonists suitable for use in the methods of the disclosure. For example, these methods include, but are not limited to, binding assays such as enzyme-linked immuno-absorbent assay (ELISA), Forte Bio© systems, and radioimmunoassay (RIA). These assays determine the ability of an antagonist to bind the polypeptide of interest (e.g., a receptor or ligand) and therefore indicate the ability of the antagonist to inhibit, neutralize or block the activity of the polypeptide. Efficacy of an antagonist can also be determined using functional assays, such as the ability of an antagonist to inhibit the function of the polypeptide or an agonist. For example, a functional assay may comprise contacting a polypeptide with a candidate antagonist molecule and measuring a detectable change in one or more biological activities normally associated with the polypeptide. The potency of an antagonist is usually defined by its IC₅₀ value (concentration required to inhibit 50% of the agonist response). The lower the IC₅₀ value the greater the potency of the antagonist and the lower the concentration that is required to inhibit the maximum biological response.

[0212] As used herein, the term “antibody” refers to a whole antibody comprising two light chain polypeptides and two heavy chain polypeptides. Whole antibodies include different antibody isotypes including IgM, IgG, IgA, IgD, and IgE antibodies. The term “antibody” includes a polyclonal antibody, a monoclonal antibody, a chimerized or chimeric antibody, a humanized antibody, a primatized antibody, a deimmunized antibody, and a fully human antibody. The antibody can be made in or derived from any of a variety of species, e.g., mammals such as humans, non-human primates (e.g., orangutan, baboons, or chimpanzees), horses, cattle, pigs, sheep, goats, dogs, cats, rabbits, guinea pigs, gerbils, hamsters, rats, and mice. The antibody can be a purified or a recombinant antibody.

[0213] As used herein, the term “antibody fragment,” “antigen-binding fragment,” or similar terms refer to a fragment of an antibody that retains the ability to bind to a target antigen(s) and promote, induce, and/or increase the activity of the target antigen. Such fragments include, e.g., a single chain antibody, a single chain Fv fragment (scFv), an Fd fragment, an Fab fragment, an Fab′ fragment, or an F(ab′)2 fragment. An scFv fragment is a single polypeptide chain that includes both the heavy and light chain variable regions of the antibody from which the scFv is derived. In addition, intrabodies, minibodies, triabodies, and diabodies are also included in the definition of antibody and are compatible for use in the methods described herein. See, e.g., Todorovska et al. (2001) J Immunol Methods 248(1):47-66; Hudson and Kortt (1999) J Immunol Methods 231(1):177-189; Poljak (1994) Structure 2(12):1121-1123; Rondon and Marasco (1997) Annual Review of Microbiology 51:257-283, the disclosures of each of which are incorporated herein by reference in their entirety.

[0214] As used herein, the term “antibody fragment” also includes, e.g., single domain antibodies such as camelized single domain antibodies. See, e.g., Muyldermans et al. (2001) Trends Biochem Sci 26:230-235; Nuttall et al. (2000) Curr Pharm Biotech 1:253-263; Reichmann et al. (1999) J Immunol Meth 231:25-38; PCT application publication nos. WO 94/04678 and WO 94/25591; and U.S. Pat. No. 6,005,079, all of which are incorporated herein by reference in their entireties. In some embodiments, the disclosure provides single domain antibodies comprising two VH domains with modifications such that single domain antibodies are formed.

[0215] The “B7 family” refers to activating and inhibitory ligands. The B7 family encompasses at least activating ligands B7-1 and B7-2, and inhibitory ligands B7-H1, B7-H2, B7-H3 and B7-H4. B7-1 and B7-2 bind to CD28, B7-H1 (i.e., PD-L1) binds to PD-1, and B7-H2 binds to ICOS. B7-H3 and B7-H4 bind unknown receptors. Further, B7-H3 and B7-H4 have been shown to be upregulated on tumor cells and tumor infiltrating cells. The complete hB7-H3 and hB7-H4 sequence can be found under GenBank Accession Nos. Q5ZPR3 and AAZ17406 (SEQ ID NOs: 49 and 50) respectively.

[0216] As used herein, the term “chimeric antigen receptor (CAR)” refers to an artificial transmembrane protein receptor comprising (i) an extracellular domain capable of binding to at least one predetermined CAR ligand or antigen, or a predetermined CAR ligand and an antigen, (ii) an intracellular segment comprising one or more cytoplasmic domains derived from signal transducing proteins different from the polypeptide from which the extracellular domain is derived, and (iii) a transmembrane domain. The “chimeric antigen receptor (CAR)” is sometimes called a “chimeric receptor”, a “T-body”, or a “chimeric immune receptor (CIR).”

[0217] The phrase “CAR ligand” used interchangeably with “CAR antigen” means any natural or synthetic molecule (e.g., small molecule, protein, peptide, lipid, carbohydrate, nucleic acid) or part or fragment thereof that can specifically bind to a CAR (e.g., the extracellular domain of a CAR). In some embodiments, the CAR ligand is a tumor-associated antigen, or fragment thereof. In some embodiments, the CAR ligand is a tag.

[0218] The “intracellular signaling domain” means any oligopeptide or polypeptide domain known to function to transmit a signal causing activation or inhibition of a biological process in a cell, for example, activation of an immune cell such as a T cell or a NK cell. Examples include ILR chain, CD28 and/or CD3.

[0219] As used herein, “cancer antigen” refers to (i) tumor-specific antigens, (ii) tumor-associated antigens, (iii) cells that express tumor-specific antigens, (iv) cells that express tumor-associated antigens, (v) embryonic antigens on tumors, (vi) autologous tumor cells, (vii) tumor-specific membrane antigens, (viii) tumor-associated membrane antigens, (ix) growth factor receptors, (x) growth factor ligands, and (xi) any other type of antigen or antigen-presenting cell or material that is associated with a cancer.

[0220] As used herein, “cancer vaccine” refers to a treatment that induces the immune system to attack cells with one or more tumor associated antigens. The vaccine can treat existing cancer (e.g., therapeutic cancer vaccine) or prevent the development of cancer in certain individuals (e.g., prophylactic cancer vaccine). The vaccine creates memory cells that will recognize tumor cells with the antigen and therefore prevent tumor growth.

[0221] As used herein, the term “chemokine” refers to a member of the family of small cytokines, or signaling proteins, that induce directed chemotaxis. Chemokines are grouped into four subfamilies: CXC, CC, (X)C, and CX3C.

[0222] As used herein, the term “collagen” refers to the predominant structural protein located within the extracellular space, and maintains the mechanical integrity of many different tissues. Collagen's molecular organization determines its function. There are more than 20 types of collagen currently identified, with type I being the most common.

[0223] As used herein, the term “collagen-binding domain” refers to a polypeptide, or a portion thereof, that binds to collagen. A collagen-binding domain may be part of a larger fusion protein, bioactive agent, or pharmaceutical agent. The binding of a composition, polypeptide or portion thereof, fusion protein, or pharmaceutical or bioactive agent to collagen can determined by methods known in the art (e.g., collagen-binding assay; see e.g., Turecek et al., (2002) Semin Thromb Hemost 28(2): 149-160). In some embodiments, a collagen-binding domain is determined by its ability to compete with a known or reference collagen-binding protein for binding to collagen. In some embodiments, a collagen-binding domains is derived from a naturally-occurring collagen-binding protein or collagen receptor. Collagen-binding proteins and collagen receptors comprising collagen-binding domains are known in the art (see e.g., Svensson et al., (2001) Osteoarthritis Cartilage 9 Suppl A:S23-28; Leitinger and Hohenester E (2007) Matrix Biol 26(3):146-155). In some embodiments, the collagen-binding domain is derived from a prokaryotic collagen-binding protein. Prokaryotic collagen-binding proteins are known in the art (see e.g., Symersky et al., (1997) Nat Struct Biol 4:833-838). In some embodiments, a collagen-binding domain comprises one or more mutations that increases its affinity for collagen.

[0224] As used herein, “combination therapy” embraces administration of each agent or therapy in a sequential or simultaneous manner in a regimen that will provide beneficial effects of the combination, and co-administration of these agents or therapies in a substantially simultaneous manner, such as in a single capsule having a fixed ratio of these active agents or in multiple, separate capsules for each agent. Combination therapy also includes combinations where individual elements may be administered at different times and/or by different routes but which act in combination to provide a beneficial effect by co-action or pharmacokinetic and pharmacodynamics effect of each agent or tumor treatment approaches of the combination therapy.

[0225] A “co-stimulatory signal”, as used herein, refers to a signal, which in combination with a primary signal, such as TCR/CD3 ligation, leads to T cell proliferation and/or upregulation or downregulation of key molecules

[0226] “Cytotoxic T Lymphocyte Associated Antigen-4 (CTLA-4)” is a T cell surface molecule and is a member of the immunoglobulin superfamily. This protein downregulates the immune system by binding to CD80 and CD86. The term “CTLA-4” as used herein includes human CTLA-4 (hCTLA-4), variants, isoforms, and species homologs of hCTLA-4, and analogs having at least one common epitope with hCTLA-4. The complete hCTLA-4 sequence can be found under GenBank Accession No. P16410 (SEQ ID NO: 46):

[0227] A polypeptide or amino acid sequence “derived from” a designated polypeptide or protein refers to the origin of the polypeptide. Preferably, the polypeptide or amino acid sequence which is derived from a particular sequence has an amino acid sequence that is essentially identical to that sequence or a portion thereof, wherein the portion consists of at least 10-20 amino acids, preferably at least 20-30 amino acids, more preferably at least 30-50 amino acids, or which is otherwise identifiable to one of ordinary skill in the art as having its origin in the sequence. Polypeptides derived from another peptide may have one or more mutations relative to the starting polypeptide, e.g., one or more amino acid residues which have been substituted with another amino acid residue or which has one or more amino acid residue insertions or deletions. A polypeptide can comprise an amino acid sequence which is not naturally occurring. Such variants necessarily have less than 100% sequence identity or similarity with the starting molecule. In certain embodiments, the variant will have an amino acid sequence from about 75% to less than 100% amino acid sequence identity or similarity with the amino acid sequence of the starting polypeptide, more preferably from about 80% to less than 100%, more preferably from about 85% to less than 100%, more preferably from about 90% to less than 100% (e.g., 91%, 92%, 93%, 94%, 95%, 96%, 97%, 98%, 99%) and most preferably from about 95% to less than 100%, e.g., over the length of the variant molecule.

[0228] In certain embodiments, there is one amino acid difference between a starting polypeptide sequence and the sequence derived therefrom. Identity or similarity with respect to this sequence is defined herein as the percentage of amino acid residues in the candidate sequence that are identical (i.e., same residue) with the starting amino acid residues, after aligning the sequences and introducing gaps, if necessary, to achieve the maximum percent sequence identity. In certain embodiments, a polypeptide consists of, consists essentially of, or comprises an amino acid sequence selected from the Sequence Summary Table. In certain embodiments, a polypeptide includes an amino acid sequence at least 80%, 81%, 82%, 83%, 84%, 85%, 86%, 87%, 88%, 89%, 90%, 91%, 92%, 93%, 94%, 95%, 96%, 97%, 98%, or 99% identical to an amino acid sequence selected from the Sequence Summary Table. In certain embodiments, a polypeptide includes a contiguous amino acid sequence at least 80%, 81%, 82%, 83%, 84%, 85%, 86%, 87%, 88%, 89%, 90%, 91%, 92%, 93%, 94%, 95%, 96%, 97%, 98%, or 99% identical to a contiguous amino acid sequence selected from the Sequence Summary Table. In certain embodiments, a polypeptide includes an amino acid sequence having at least 10, 15, 20, 25, 30, 35, 40, 45, 50, 55, 60, 65, 70, 75, 80, 85, 90, 95, 100, 200, 300, 400, or 500 (or any integer within these numbers) contiguous amino acids of an amino acid sequence selected from the Sequence Summary Table.

[0229] In certain embodiments, the peptides of the disclosure are encoded by a nucleotide sequence. Nucleotide sequences of the disclosure can be useful for a number of applications, including: cloning, gene therapy, protein expression and purification, mutation introduction, DNA vaccination of a host in need thereof, antibody generation for, e.g., passive immunization, PCR, primer and probe generation, and the like. In certain embodiments, the nucleotide sequence of the disclosure comprises, consists of, or consists essentially of, a nucleotide sequence selected from SEQ ID NOs: 3, 5, 7, 9, 11, 15, 17, 19, 21, 23, 25, 27, 29, 31, and 33. In certain embodiments, a nucleotide sequence includes a nucleotide sequence at least 80%, 81%, 82%, 83%, 84%, 85%, 86%, 87%, 88%, 89%, 90%, 91%, 92%, 93%, 94%, 95%, 96%, 97%, 98%, or 99% identical to a nucleotide sequence set forth in the Sequence Summary Table. In certain embodiments, a nucleotide sequence includes a contiguous nucleotide sequence at least 80%, 81%, 82%, 83%, 84%, 85%, 86%, 87%, 88%, 89%, 90%, 91%, 92%, 93%, 94%, 95%, 96%, 97%, 98%, or 99% identical to a contiguous nucleotide sequence set forth in the Sequence Summary Table. In certain embodiments, a nucleotide sequence includes a nucleotide sequence having at least 10, 15, 20, 25, 30, 35, 40, 45, 50, 55, 60, 65, 70, 75, 80, 85, 90, 95, 100, 200, 300, 400, or 500 (or any integer within these numbers) contiguous nucleotides of a nucleotide sequence set forth in the Sequence Summary Table.

[0230] It will also be understood by one of ordinary skill in the art that the polypeptides suitable for use in the immunomodulatory fusion proteins disclosed herein may be altered such that they vary in sequence from the naturally occurring or native sequences from which they were derived, while retaining the desirable activity of the native sequences. For example, nucleotide or amino acid substitutions leading to conservative substitutions or changes at “non-essential” amino acid residues may be made. Mutations may be introduced by standard techniques, such as site-directed mutagenesis and PCR-mediated mutagenesis.

[0231] The polypeptides suitable for use in the immunomodulatory fusion proteins disclosed herein may comprise conservative amino acid substitutions at one or more amino acid residues, e.g., at essential or non-essential amino acid residues. A “conservative amino acid substitution” is one in which the amino acid residue is replaced with an amino acid residue having a similar side chain. Families of amino acid residues having similar side chains have been defined in the art, including basic side chains (e.g., lysine, arginine, histidine), acidic side chains (e.g., aspartic acid, glutamic acid), uncharged polar side chains (e.g., glycine, asparagine, glutamine, serine, threonine, tyrosine, cysteine), nonpolar side chains (e.g., alanine, valine, leucine, isoleucine, proline, phenylalanine, methionine, tryptophan), beta-branched side chains (e.g., threonine, valine, isoleucine) and aromatic side chains (e.g., tyrosine, phenylalanine, tryptophan, histidine). Thus, a nonessential amino acid residue in a binding polypeptide is preferably replaced with another amino acid residue from the same side chain family. In certain embodiments, a string of amino acids can be replaced with a structurally similar string that differs in order and/or composition of side chain family members. Alternatively, in certain embodiments, mutations may be introduced randomly along all or part of a coding sequence, such as by saturation mutagenesis, and the resultant mutants can be incorporated into binding polypeptides of the disclosure and screened for their ability to bind to the desired target.

[0232] As used herein, the term “effector cell” or “effector immune cell” refers to a cell involved in an immune response, e.g., in the promotion of an immune effector response. In some embodiments, immune effector cells specifically recognize an antigen. Examples of immune effector cells include, but are not limited to, Natural Killer (NK) cells, B cells, monocytes, macrophages, T cells (e.g., cytotoxic T lymphocytes (CTLs). In some embodiments, the effector cell is a T cell. As used herein, the term “immune effector function” or “immune effector response” refers to a function or response of an immune effector cell that promotes an immune response to a target.

[0233] As used herein, the term “Fc region” refers to the portion of a native immunoglobulin formed by the respective Fc domains (or Fc moieties) of its two heavy chains. In some embodiments, the term “Fc domain” refers to a portion of a single immunoglobulin (Ig) heavy chain wherein the Fc domain does not comprise an Fv domain. In some embodiments, the term “Fc domain” refers to a portion of a single immunoglobulin (Ig) heavy chain also comprising an Fv domain. As such, an Fc domain can also be referred to as “Ig” or “IgG.” In certain embodiments, an Fc domain begins in the hinge region just upstream of the papain cleavage site and ends at the C-terminus of the antibody. Accordingly, a complete Fc domain comprises at least a hinge domain, a CH2 domain, and a CH3 domain. In certain embodiments, an Fc domain comprises at least one of: a hinge (e.g., upper, middle, and/or lower hinge region) domain, a CH2 domain, a CH3 domain, a CH4 domain, or a variant, portion, or fragment thereof. In certain embodiments, an Fc domain comprises a complete Fc domain (i.e., a hinge domain, a CH2 domain, and a CH3 domain). In certain embodiments, an Fc domain comprises a hinge domain (or portion thereof) fused to a CH3 domain (or portion thereof). In certain embodiments, an Fc domain comprises a CH2 domain (or portion thereof) fused to a CH3 domain (or portion thereof). In certain embodiments, an Fc domain consists of a CH3 domain or portion thereof. In certain embodiments, an Fc domain consists of a hinge domain (or portion thereof) and a CH3 domain (or portion thereof). In certain embodiments, an Fc domain consists of a CH2 domain (or portion thereof) and a CH3 domain. In certain embodiments, an Fc domain consists of a hinge domain (or portion thereof) and a CH2 domain (or portion thereof). In certain embodiments, an Fc domain lacks at least a portion of a CH2 domain (e.g., all or part of a CH2 domain). An Fc domain herein generally refers to a polypeptide comprising all or part of the Fc domain of an immunoglobulin heavy-chain. This includes, but is not limited to, polypeptides comprising the entire CH1, hinge, CH2, and/or CH3 domains as well as fragments of such peptides comprising only, e.g., the hinge, CH2, and CH3 domain. The Fc domain may be derived from an immunoglobulin of any species and/or any subtype, including, but not limited to, a human IgG1, IgG2, IgG3, IgG4, IgD, IgA, IgE, or IgM antibody. A human IgG1 constant region can be found at Uniprot P01857 and SEQ ID NO: 114. The Fc domain of human IgG1 can be found in SEQ ID NO: 115. The Fc domain encompasses native Fc and Fc variant molecules. As with Fc variants and native Fc's, the term Fc domain includes molecules in monomeric or multimeric form, whether digested from whole antibody or produced by other means. The assignment of amino acid residue numbers to an Fc domain is in accordance with the definitions of Kabat. See, e.g., Sequences of Proteins of Immunological Interest (Table of Contents, Introduction and Constant Region Sequences sections), 5th edition, Bethesda, Md.:NIH vol. 1:647-723 (1991); Kabat et al., “Introduction” Sequences of Proteins of Immunological Interest, US Dept of Health and Human Services, NIH, 5th edition, Bethesda, Md. vol. l:xiii-xcvi (1991); Chothia & Lesk, J. Mol. Biol. 196:901-917 (1987); Chothia et al., Nature 342:878-883 (1989), each of which is herein incorporated by reference for all purposes.

[0234] As set forth herein, it will be understood by one of ordinary skill in the art that any Fc domain may be modified such that it varies in amino acid sequence from the native Fc domain of a naturally occurring immunoglobulin molecule. In certain embodiments, the Fc domain has reduced effector function (e.g., FcγR binding).

[0235] The Fc domains suitable for use in the immunomodulatory fusion proteins disclosed herein may be derived from different immunoglobulin molecules. For example, an Fc domain of a polypeptide may comprise a CH2 and/or CH3 domain derived from an IgG1 molecule and a hinge region derived from an IgG3 molecule. In another example, an Fc domain can comprise a chimeric hinge region derived, in part, from an IgG1 molecule and, in part, from an IgG3 molecule. In another example, an Fc domain can comprise a chimeric hinge derived, in part, from an IgG1 molecule and, in part, from an IgG4 molecule.

[0236] As used herein, the term “gly-ser polypeptide linker” or “gly-ser linker” refers to a peptide that consists of glycine and serine residues. An exemplary gly-ser polypeptide linker comprises the amino acid sequence Ser(Gly₄Ser)n. In certain embodiments, n=1. In certain embodiments, n=2. In certain embodiments, n=3, i.e., Ser(Gly₄Ser)3. In certain embodiments, n=4, i.e., Ser(Gly₄Ser)4. In certain embodiments, n=5. In certain embodiments, n=6. In certain embodiments, n=7. In certain embodiments, n=8. In certain embodiments, n=9. In certain embodiments, n=10. Another exemplary gly-ser polypeptide linker comprises the amino acid sequence (Gly₄Ser)n. In certain embodiments, n=1. In certain embodiments, n=2. In certain embodiments, n=3. In certain embodiments, n=4. In certain embodiments, n=5. In certain embodiments, n=6. Another exemplary gly-ser polypeptide linker comprises the amino acid sequence (Gly₃Ser)n. certain embodiments, n=1. In certain embodiments, n=2. In certain embodiments, n=3. In certain embodiments, n=4. In certain embodiments, n=5. In certain embodiments, n=6.

[0237] As used herein, the term “human antibody” includes antibodies having variable and constant regions (if present) of human germline immunoglobulin sequences. Human antibodies of the disclosure can include amino acid residues not encoded by human germline immunoglobulin sequences (e.g., mutations introduced by random or site-specific mutagenesis in vitro or by somatic mutation in vivo) (see, Lonberg, N. et al. (1994) Nature 368(6474): 856-859); Lonberg, N. (1994) Handbook of Experimental Pharmacology 113:49-101; Lonberg, N. and Huszar, D. (1995) Intern. Rev. Immunol. Vol. 13: 65-93, and Harding, F. and Lonberg, N. (1995) Ann. N.Y. Acad. Sci 764:536-546). However, the term “human antibody” does not include antibodies in which CDR sequences derived from the germline of another mammalian species, such as a mouse, have been grafted onto human framework sequences (i.e., humanized antibodies).

[0238] As used herein, the term a “heterologous antibody” is defined in relation to the transgenic non-human organism producing such an antibody. This term refers to an antibody having an amino acid sequence or an encoding nucleic acid sequence corresponding to that found in an organism not consisting of the transgenic non-human animal, and generally from a species other than that of the transgenic non-human animal.

[0239] As used herein, “immune cell” is a cell of hematopoietic origin and that plays a role in the immune response. Immune cells include lymphocytes (e.g., B cells and T cells), natural killer cells, and myeloid cells (e.g., monocytes, macrophages, eosinophils, mast cells, basophils, and granulocytes).

[0240] As used herein, “immune checkpoint” refers to co-stimulatory and inhibitory signals that regulates immune cells\. In certain embodiments, the immune checkpoint is an inhibitory signal. In certain embodiments, the inhibitory signal is the interaction between PD-1 and PD-L1. In certain embodiments, the inhibitory signal is the interaction between CTLA-4 and CD80 or CD86 to displace CD28 binding. In certain embodiments the inhibitory signal is the interaction between LAG3 and MHC class II molecules. In certain embodiments, the inhibitory signal is the interaction between TIM3 and galectin 9.

[0241] As used herein, “immune checkpoint blocker” refers to a molecule that totally or partially reduces, inhibits, interferes with or modulates one or more checkpoint proteins. In certain embodiments, the immune checkpoint blocker prevents inhibitory signals associated with the immune checkpoint. In certain embodiments, the immune checkpoint blocker is an antibody, or fragment thereof that disrupts inhibitory signaling associated with the immune checkpoint. In certain embodiments, the immune checkpoint blocker is a small molecule that disrupts inhibitory signaling. In certain embodiments, the immune checkpoint blocker is an antibody, fragment thereof, or antibody mimic, that prevents the interaction between checkpoint blocker proteins, e.g., an antibody, or fragment thereof, that prevents the interaction between PD-1 and PD-L1. In certain embodiments, the immune checkpoint blocker is an antibody, or fragment thereof, that prevents the interaction between CTLA-4 and CD80 or CD86. In certain embodiments, the immune checkpoint blocker is an antibody, or fragment thereof, that prevents the interaction between LAG3 and its ligands, or TIM-3 and its ligands.

[0242] As used herein, the term “immunomodulatory fusion protein” refers to a polypeptide comprising a collagen-binding domain operably linked to at least one immunomodulatory domain. In some embodiments, the collagen-binding domain is operably linked to the immunomodulatory domain via a linker.

[0243] As used herein, the term “immunomodulatory domain” refers to a polypeptide (e.g., cytokine, agonist or antagonistic antibody) that confers an activity resulting in activation or suppression of an immune response (e.g., stimulation of CD8+ T cells). In some embodiments, the immunomodulatory domain refers to a polypeptide that binds to its cognate ligand or receptor, thereby resulting in activation or suppression of an immune response.

[0244] The terms “inducing an immune response” and “enhancing an immune response” are used interchangeably and refer to the stimulation of an immune response (i.e., either passive or adaptive) to a particular antigen. The term “induce” as used with respect to inducing CDC or ADCC refer to the stimulation of particular direct cell killing mechanisms.

[0245] As used herein, a subject “in need of prevention,” “in need of treatment,” or “in need thereof,” refers to one, who by the judgment of an appropriate medical practitioner (e.g., a doctor, a nurse, or a nurse practitioner in the case of humans; a veterinarian in the case of non-human mammals), would reasonably benefit from a given treatment (such as treatment with a composition comprising a fusion protein described herein).

[0246] The term “in vivo” refers to processes that occur in a living organism.

[0247] As used herein, “interleukin (IL)-2,” refers to a pleiotropic cytokine that activates and induces proliferation of T cells and natural killer (NK) cells. IL-2 signals by binding its receptor, IL-2R, which is comprised of alpha, beta, and gamma subunits. IL-2 signaling stimulates proliferation of antigen-activated T cells.

[0248] As used herein, the term “isolated antibody” is intended to refer to an antibody which is substantially free of other antibodies having different antigenic specificities (e.g., an isolated antibody that binds to immune checkpoint blockers or co-stimulatory molecules) is substantially free of antibodies that specifically bind antigens other than the target of interest. An isolated antibody that specifically binds to an epitope may, however, have cross-reactivity to other targets from different species. In addition, an isolated antibody is typically substantially free of other cellular material and/or chemicals.

[0249] As used herein, the term “isolated nucleic acid molecule” refers to nucleic acids encoding fusion proteins, polypeptides, antibodies or antibody portions disclosed herein, is intended to refer to a nucleic acid molecule in which the nucleotide sequences encoding the fusion protein, polypeptide, antibody or antibody portion are free of other nucleotide sequences, which other sequences may naturally flank the nucleic acid in human genomic DNA.

[0250] As used herein, “isotype” refers to the antibody class (e.g., IgM or IgG1) that is encoded by heavy chain constant region genes. In some embodiments, an antibody of the disclosure is of the IgG1 isotype. In some embodiments, an antibody of the disclosure is of the IgG2 isotype. In some embodiments, an antibody of the disclosure is of the IgG3 isotype. In some embodiments, an antibody of the disclosure is of the IgG4 isotype.

[0251] As used herein the term “KD” or “K_{D}” refers to the equilibrium dissociation constant of a binding reaction between e.g., a ligand and a receptor, an antigen and an antibody, or a collagen-binding protein and collagen. The value of K_{D} is a numeric representation of the ratio of the binding protein off-rate constant (kd) to the binding protein on-rate constant (ka). The value of K_{D} is inversely related to the binding affinity of the binding protein to its binding partner. The smaller the K_{D} value the greater the affinity of the binding protein for its binding partner. Affinity is the strength of binding of a single molecule to its ligand and is typically measured and reported by the equilibrium dissociation constant (K_{D}), which is used to evaluate and rank order strengths of bimolecular interactions.

[0252] As used herein, the term “kd” or “k_{d}” (alternatively “koff” or “k_{off}”) is intended to refer to the off-rate constant for the dissociation of a binding protein from binding protein/partner complex. The value of kd is a numeric representation of the fraction of complexes that decay or dissociate per second, and is expressed in units sec⁻¹.

[0253] As used herein, the term “ka” or “kₐ” (alternatively “kon” or “kₒₙ”) is intended to refer to the on-rate constant for the association of a binding protein with a binding partner. The value of ka is a numeric representation of the number of antibody/antigen complexes formed per second in a 1 molar (1M) solution of binding partners, and is expressed in units M⁻¹ sec⁻¹.

[0254] As used herein, the terms “linked,” “operably linked,” “fused” or “fusion”, are used interchangeably. These terms refer to the joining together of two more elements or components or domains, by whatever means including chemical conjugation, noncovalent complex formation or recombinant means. Methods of chemical conjugation (e.g., using heterobifunctional crosslinking agents) are known in the art.

[0255] As used herein, “local administration” or “local delivery,” refers to delivery that does not rely upon transport of the composition or agent to its intended target tissue or site via the vascular system. For example, the immunomodulatory fusion protein or composition comprising the fusion protein may be delivered by injection or implantation of the fusion protein or composition, or by injection or implantation of a device containing the fusion protein or composition. Following local administration in the vicinity of a target tissue or site, the composition or agent, or one or more components thereof, may diffuse to the intended target tissue or site. In some embodiments, an immunomodulatory fusion protein is locally administered by viral vectors, electroporation, transplantation of cells expressing the immunomodulatory fusion protein, or replicons.

[0256] “Lymphocyte Activation Gene-3 (LAG3)” is an inhibitory receptor associated with inhibition of lymphocyte activity by binding to MHC class II molecules. This receptor enhances the function of Treg cells and inhibits CD8+ effector T cell function. The term “LAG3” as used herein includes human LAG3 (hLAG3), variants, isoforms, and species homologs of hLAG3, and analogs having at least one common epitope. The complete hLAG3 sequence can be found under GenBank Accession No. P18627 (SEQ ID NO: 47).

[0257] The term “mammal” or “subject” or “patient” as used herein includes both humans and non-humans and includes, but is not limited to, humans, non-human primates, canines, felines, murines, bovines, equines, and porcines.

[0258] “Nucleic acid” refers to deoxyribonucleotides or ribonucleotides and polymers thereof in either single- or double-stranded form. Unless specifically limited, the term encompasses nucleic acids containing known analogues of natural nucleotides that have similar binding properties as the reference nucleic acid and are metabolized in a manner similar to naturally occurring nucleotides. Unless otherwise indicated, a particular nucleic acid sequence also implicitly encompasses conservatively modified variants thereof (e.g., degenerate codon substitutions) and complementary sequences and as well as the sequence explicitly indicated. Specifically, degenerate codon substitutions can be achieved by generating sequences in which the third position of one or more selected (or all) codons is substituted with mixed-base and/or deoxyinosine residues (Batzer et al., Nucleic Acid Res. 19:5081, 1991; Ohtsuka et al., Biol. Chem. 260:2605-2608, 1985; and Cassol et al, 1992; Rossolini et al, Mol. Cell. Probes 8:91-98, 1994). For arginine and leucine, modifications at the second base can also be conservative. The term nucleic acid is used interchangeably with gene, cDNA, and mRNA encoded by a gene.

[0259] Polynucleotides used herein can be composed of any polyribonucleotide or polydeoxribonucleotide, which can be unmodified RNA or DNA or modified RNA or DNA. For example, polynucleotides can be composed of single- and double-stranded DNA, DNA that is a mixture of single- and double-stranded regions, single- and double-stranded RNA, and RNA that is mixture of single- and double-stranded regions, hybrid molecules comprising DNA and RNA that can be single-stranded or, more typically, double-stranded or a mixture of single- and double-stranded regions. In addition, the polynucleotide can be composed of triple-stranded regions comprising RNA or DNA or both RNA and DNA. A polynucleotide can also contain one or more modified bases or DNA or RNA backbones modified for stability or for other reasons. “Modified” bases include, for example, tritylated bases and unusual bases such as inosine. A variety of modifications can be made to DNA and RNA; thus, “polynucleotide” embraces chemically, enzymatically, or metabolically modified forms.

[0260] As used herein, “parenteral administration,” “administered parenterally,” and other grammatically equivalent phrases, refer to modes of administration other than enteral and topical administration, usually by injection, and include, without limitation, intravenous, intranasal, intraocular, intramuscular, intraarterial, intrathecal, intracapsular, intraorbital, intracardiac, intradermal, intraperitoneal, transtracheal, subcutaneous, subcuticular, intraarticular, subcapsular, subarachnoid, intraspinal, epidural, intracerebral, intracranial, intracarotid, intracolonic/intraintestinal, intravervical/intravaginal, and intrasternal injection and infusion.

[0261] The term “percent identity,” in the context of two or more nucleic acid or polypeptide sequences, refer to two or more sequences or subsequences that have a specified percentage of nucleotides or amino acid residues that are the same, when compared and aligned for maximum correspondence, as measured using one of the sequence comparison algorithms described below (e.g., BLASTP and BLASTN or other algorithms available to persons of skill) or by visual inspection. Depending on the application, the “percent identity” can exist over a region of the sequence being compared, e.g., over a functional domain, or, alternatively, exist over the full length of the two sequences to be compared. For sequence comparison, typically one sequence acts as a reference sequence to which test sequences are compared. When using a sequence comparison algorithm, test and reference sequences are input into a computer, subsequence coordinates are designated, if necessary, and sequence algorithm program parameters are designated. The sequence comparison algorithm then calculates the percent sequence identity for the test sequence(s) relative to the reference sequence, based on the designated program parameters.

[0262] Optimal alignment of sequences for comparison can be conducted, e.g., by the local homology algorithm of Smith & Waterman, Adv. Appl. Math. 2:482 (1981), by the homology alignment algorithm of Needleman & Wunsch, J. Mol. Biol. 48:443 (1970), by the search for similarity method of Pearson & Lipman, Proc. Nat'l. Acad. Sci. USA 85:2444 (1988), by computerized implementations of these algorithms (GAP, BESTFIT, FASTA, and TFASTA in the Wisconsin Genetics Software Package, Genetics Computer Group, 575 Science Dr., Madison, Wis.), or by visual inspection (see generally Ausubel et al., infra).

[0263] One example of an algorithm that is suitable for determining percent sequence identity and sequence similarity is the BLAST algorithm, which is described in Altschul et al., J. Mol. Biol. 215:403-410 (1990). Software for performing BLAST analyses is publicly available through the National Center for Biotechnology Information website.

[0264] As generally used herein, “pharmaceutically acceptable” refers to those compounds, materials, compositions, and/or dosage forms which are, within the scope of sound medical judgment, suitable for use in contact with the tissues, organs, and/or bodily fluids of human beings and animals without excessive toxicity, irritation, allergic response, or other problems or complications commensurate with a reasonable benefit/risk ratio.

[0265] “Polypeptide,” “peptide”, and “protein” are used interchangeably herein to refer to a polymer of amino acid residues. The terms apply to amino acid polymers in which one or more amino acid residue is an artificial chemical mimetic of a corresponding naturally occurring amino acid, as well as to naturally occurring amino acid polymers and non-naturally occurring amino acid polymer.

[0266] The “Programmed Death-1 (PD-1)” receptor refers to an immuno-inhibitory receptor belonging to the CD28 family. PD-1 is expressed predominantly on previously activated T cells in vivo, and binds to two ligands, PD-L1 and PD-L2. The term “PD-1” as used herein includes human PD-1 (hPD-1), variants, isoforms, and species homologs of hPD-1, and analogs having at least one common epitope with hPD-1. The complete hPD-1 sequence can be found under GenBank Accession No. AAC51773 (SEQ ID NO: 44).

[0267] “Programmed Death Ligand-1 (PD-L1)” is one of two cell surface glycoprotein ligands for PD-1 (the other being PD-L2) that downregulates T cell activation and cytokine secretion upon binding to PD-1. The term “PD-L1” as used herein includes human PD-L1 (hPD-L1), variants, isoforms, and species homologs of hPD-L1, and analogs having at least one common epitope with hPD-L1. The complete hPD-L1 sequence can be found under GenBank Accession No. Q9NZQ7 (SEQ ID NO: 45).

[0268] As used herein, the term “purified” or “isolated” as applied to any of the proteins (fusion proteins, antibodies or fragments) described herein refers to a polypeptide that has been separated or purified from components (e.g., proteins or other naturally-occurring biological or organic molecules) which naturally accompany it, e.g., other proteins, lipids, and nucleic acid in a prokaryote expressing the proteins. Typically, a polypeptide is purified when it constitutes at least 60 (e.g., at least 65, 70, 75, 80, 85, 90, 92, 95, 97, or 99) %, by weight, of the total protein in a sample.

[0269] As used herein, the terms “specifically binds” and “selectively binds” refers to binding by a collagen-binding domain to collagen, or binding by an antibody to an epitope on a predetermined antigen. In some embodiments, a collagen-binding domain specifically binds or selectively binds to collagen based on the K_{D} for collagen (i.e., the K_{D} for binding to collagen is lower than the K_{D} for at least fibronectin, vitronectin, osteopontin, tenascin C or fibrinogen).

[0270] The term “sufficient amount” or “amount sufficient to” means an amount sufficient to produce a desired effect, e.g., an amount sufficient to reduce the size of a tumor.

[0271] The term “T cell” refers to a type of white blood cell that can be distinguished from other white blood cells by the presence of a T cell receptor on the cell surface. There are several subsets of T cells, including, but not limited to, T helper cells (a.k.a. T_{H} cells or CD4⁺ T cells) and subtypes, including T_{H}1, T_{H}2, T_{H}3, T_{H}17, T_{H}9, and T_{FH} cells, cytotoxic T cells (a.k.a T_{C} cells, CD8⁺ T cells, cytotoxic T lymphocytes, T-killer cells, killer T cells), memory T cells and subtypes, including central memory T cells (T_{CM} cells), effector memory T cells (T_{EM} and T_{EMRA} cells), and resident memory T cells (T_{RM} cells), regulatory T cells (a.k.a. T_{reg} cells or suppressor T cells) and subtypes, including CD4⁺ FOXP3⁺ T_{reg} cells, CD4+FOXP3⁻ T_{reg} cells, Tr1 cells, Th3 cells, and T_{reg}17 cells, natural killer T cells (a.k.a. NKT cells), mucosal associated invariant T cells (MAITs), and gamma delta T cells (γδ T cells), including Vγ9/Vδ2 T cells. Any one or more of the aforementioned or unmentioned T cells may be the target cell type for a method as disclosed herein.

[0272] The term “T cell cytotoxicity” includes any immune response that is mediated by CD8+ T cell activation. Exemplary immune responses include cytokine production, CD8+ T cell proliferation, granzyme or perforin production, and clearance of an infectious agent.

[0273] “T Cell Membrane Protein-3 (TIM3)” is an inhibitory receptor involved in the inhibition of lymphocyte activity by inhibition of T_{H}1 cells responses. Its ligand is galectin 9, which is upregulated in various types of cancers. The term “TIM3” as used herein includes human TIM3 (hTIM3), variants, isoforms, and species homologs of hTIM3, and analogs having at least one common epitope. The complete hTIM3 sequence can be found under GenBank Accession No. Q8TDQo (SEQ ID NO: 48).

[0274] A “therapeutic antibody” is an antibody, fragment of an antibody, or construct that is derived from an antibody, and can bind to a cell-surface antigen on a target cell to cause a therapeutic effect. Such antibodies can be chimeric, humanized or fully human antibodies. Methods are known in the art for producing such antibodies. Such antibodies include single chain Fc fragments of antibodies, minibodies and diabodies. Any of the therapeutic antibodies known in the art to be useful for cancer therapy can be used in the combination therapy suitable for use in the methods disclosed herein. Therapeutic antibodies may be monoclonal antibodies or polyclonal antibodies. In preferred embodiments, the therapeutic antibodies target cancer antigens.

[0275] The term “therapeutically effective amount” is an amount that is effective to ameliorate a symptom of a disease. A therapeutically effective amount can be a “prophylactically effective amount” as prophylaxis can be considered therapy.

[0276] As used herein, the term “vector” is intended to refer to a nucleic acid molecule capable of transporting another nucleic acid to which it has been linked. One type of vector is a “plasmid,” which refers to a circular double stranded DNA loop into which additional DNA segments may be ligated. Another type of vector is a viral vector, wherein additional DNA segments may be ligated into the viral genome. Certain vectors are capable of autonomous replication in a host cell into which they are introduced (e.g., bacterial vectors having a bacterial origin of replication and episomal mammalian vectors). Other vectors (e.g., non-episomal mammalian vectors) can be integrated into the genome of a host cell upon introduction into the host cell, and thereby are replicated along with the host genome. Moreover, certain vectors are capable of directing the expression of genes to which they are operatively linked. Such vectors are referred to herein as “recombinant expression vectors” (or simply, “expression vectors”). In general, expression vectors of utility in recombinant DNA techniques are often in the form of plasmids. In the present specification, “plasmid” and “vector” may be used interchangeably as the plasmid is the most commonly used form of vector. However, the disclosure is intended to include such other forms of expression vectors, such as viral vectors (e.g., replication defective retroviruses, adenoviruses and adeno-associated viruses), which serve equivalent functions.

### Immunomodulatory Fusion Protein

[0277] In some aspects, the disclosure provides an immunomodulatory fusion protein comprising a collagen-binding domain operably linked to an immunomodulatory domain. In some embodiments, the immunomodulatory fusion protein further comprises a linker, such that the collagen-binding domain is operably linked to a linker, and the linker is operably linked to the immunomodulatory domain.

### I. Collagen-Binding Domains

[0278] In some embodiments, the disclosure provides immunomodulatory fusion proteins comprising a collagen-binding domain. In some embodiments, the collagen-binding domain has a MW of about 5-100 kDa, about 10-80 kDa, about 20-60 kDa, about 30-50 kDa, or about 10 kDa, about 20 kDa, about 30 kDa, about 40 kDa, about 50 kDa, about 60 kDa, about 70 kDa, about 80 kDa, about 90 kDa or about 100 kDa. In some embodiments, the collagen-binding domain is about 5 kDa, about 10 kDa, about 20 kDa, about 30 kDa, about 40 kDa, about 50 kDa, about 60 kDa, about 70 kDa, about 80 kDa, about 90 kDa, or about 100 kDa. In some embodiments, the collagen-binding domain is about 30 kDa. In some embodiments, the collagen-binding domain is about 40 kDa.

[0279] In some embodiments, the collagen-binding domain is about 10-350, about 10-300, about 10-250, about 10-200, about 10-150, about 10-100, about 10-50, or about 10-20 amino acids in length. In some embodiments, the collagen-binding domain is about 10 amino acids in length. In some embodiments, the collagen-binding domain is about 15 amino acids in length. In some embodiments, the collagen-binding domain is about 20 amino acids in length. In some embodiments, the collagen-binding domain is about 30 amino acids in length. In some embodiments, the collagen-binding domain is about 40 amino acids in length. In some embodiments, the collagen-binding domain is about 50 amino acids in length. In some embodiments, the collagen-binding domain is about 60 amino acids in length. In some embodiments, the collagen-binding domain is about 70 amino acids in length. In some embodiments, the collagen-binding domain is about 80 amino acids in length. In some embodiments, the collagen-binding domain is about 90 amino acids in length. In some embodiments, the collagen-binding domain is about 100 amino acids in length. In some embodiments, the collagen-binding domain is about 120 amino acids in length. In some embodiments, the collagen-binding domain is about 150 amino acids in length. In some embodiments, the collagen-binding domain is about 200 amino acids in length. In some embodiments, the collagen-binding domain is about 250 amino acids in length. In some embodiments, the collagen-binding domain is about 300 amino acids in length. In some embodiments, the collagen-binding domain is about 350 amino acids in length.

### A. Isoelectric Point

[0280] The isoelectric point (pI, pH(I), IEP), is the pH at which a particular molecule (e.g., a collagen-binding domain) carries no net electrical charge or is electrically neutral. Table 1 provides the calculated pI for exemplary collagen-binding domains, described herein. The ExPASy tool from Swiss Institute of Bioinformatics (https://web.expasy.org/compute_pi/) was used to calculate the isoelectric points (pI) of the collagen-binding domains shown in Table 1.

[0281] In some embodiments, the collagen-binding domain has an isoelectric point pI less than (<) about 10, about 8, about 6, about 4, about 2, or about 1. In some embodiments, the collagen-binding domain has an isoelectric point pI of less than (<) 10. In some embodiments, the collagen-binding domain has an isoelectric point pI of less than (<) 10 and a molecular weight (MW) of greater than (>) 5 kDa.

TABLE 1
Calculated pI for Exemplary Collagen-Binding Domains

| Collagen-Binding Domain | Calculated pI | SEQ ID NO |
|---|---|---|
| LAIR1 | 5.23 | 98 |
| LAIR2 | 4.88 | 99 |
| Glycoprotein IV | 7.68 | 100 |
| Nidogen | 5.05 | 101 |
| Perlecan | 6.03 | 102 |
| Biglycan | 8.13 | 103 |
| Decorin | 8.76 | 104 |
| Asporin | 6.1 | 105 |
| Fibromodulin | 5.66 | 106 |
| Lumican | 6.17 | 107 |
| PRELP | 9.45 | 108 |
| Osteoadherin/Osteomodulin | 5.22 | 109 |
| Opticin | 5.38 | 110 |
| Osteoglycin/Mimecan | 5.22 | 111 |
| Chondroadherin | 9.14 | 112 |
| Podcan | 6.41 | 113 |
| Lumican (murine) | 6.01 | 195 |

### B. Type I Collagen

[0282] Collagen is the predominant structural protein located within the extracellular space and type I collagen is the most abundant protein in mammals (Di Lullo et al., (2002) J Biol Chem 277(6):4223-4231). The fundamental structural unit of type I collagen is a long (300-nm), thin (1.5-nm-diameter) protein that consists of three coiled subunits: two α1(I) chains and one α2(I). Each chain contains 1050 amino acids wound around one another in a characteristic right-handed triple helix. In humans, type I collagen is encoded by the COL1A1 and COL1A2 genes. The COL1A1 gene encodes the pro-alpha1 chain of type I collagen. The COL1A2 gene pro-alpha2 chain of type I collagen, whose triple helix comprises two alpha1 chains and one alpha2 chain. Type I is a fibril-forming collagen found in most connective tissues and is abundant in bone, cornea, dermis and tendon.

[0283] An exemplary amino acid sequence for the human alpha1 chain precursor of type I collagen is set forth in SEQ ID NO: 90 (NCBI Reference Sequence: NP_000079.2).

[0284] An exemplary amino acid sequence for the human alpha2 chain precursor of type I collagen is set forth in SEQ ID NO: 91 (NCBI Reference Sequence: NP_000080.2).

### C. Type IV Collagen

[0285] Type IV collagen is comprised of a family of polypeptides and is a major constituent of mammalian basement membranes (Timpl (1989) Eur J Biochem 180:487-502; Paulsson (1992) Crit Rev Biochem Mol Biol 27:93-127). The α1(IV) and α2(IV) chains are products of distinct genes (COL4A1 and COL4A2, respectively) located pairwise in a head-to-head fashion on chromosome 13 in humans (Hudson et al., (1993) J Biol Chem 268:26033-26036). The α3(IV) and α4(IV) chains (encoded by the COL4A3 and COL4A4 genes, respectively) are present in the same orientation on chromosome 2 in humans, and the α5(IV) and α6(IV) chains (encoded by the COL4A5 and COL4A6 genes, respectively) are located on the X chromosome in humans (Hudson et al., (1991) in Pathobiochemistry, ed Kang A. (CRC Press, Boca Raton, Fla.), pp 17-30).

[0286] An exemplary amino acid sequence for the human alpha1 chain of type IV collagen is set forth in SEQ ID NO: 92 (NCBI Reference Sequence: XP_011519350.1).

[0287] An exemplary amino acid sequence for the human alpha2 chain of type IV collagen is set forth in SEQ ID NO: 93 (NCBI Reference Sequence: NP_001837.2).

[0288] An exemplary amino acid sequence for the human alpha3 chain of type IV collagen is set forth in SEQ ID NO: 94 (NCBI Reference Sequence: NP_000082.2).

[0289] An exemplary amino acid sequence for the human alpha4 chain of type IV collagen is set forth in SEQ ID NO: 95 (NCBI Reference Sequence: NP_000083.3).

[0290] An exemplary amino acid sequence for the human alpha5 chain of type IV collagen is set forth in SEQ ID NO: 96 (NCBI Reference Sequence: XP_011529151.2).

[0291] An exemplary amino acid sequence for the human alpha6 chain of type IV collagen is set forth in SEQ ID NO: 97 (NCBI Reference Sequence: XP_006724680.1).

[0292] Accordingly, in some embodiments, the disclosure provides immunomodulatory fusion proteins comprising a collagen-binding domain that specifically binds collagen. In some embodiments, the collagen-binding domain specifically binds human type I collagen and/or human type IV collagen. In some embodiments, the collagen-binding domain binds human type I collagen. In some embodiments, the collagen-binding domain binds human type IV collagen. In some embodiments, the collagen-binding domain specifically binds human type I collagen and human type IV collagen. In some embodiments, the collagen-binding domain specifically binds human type I collagen or human type IV collagen.

### D. Binding Affinity to Collagen

[0293] In some embodiments, the disclosure provide immunomodulatory fusion proteins comprising a collagen-binding domain that specifically binds collagen with an affinity (K_{D}) of less than about 0.5 nM as determined by a collagen-binding assay. In some embodiments, the disclosure provide immunomodulatory fusion proteins comprising a collagen-binding domain that specifically binds collagen with an affinity (K_{D}) of less than about 5 nM as determined by a collagen-binding assay. In some embodiments, the disclosure provide immunomodulatory fusion proteins comprising a collagen-binding domain that specifically binds collagen with an affinity (K_{D}) of less than about 50 nM as determined by a collagen-binding assay. In some embodiments, the disclosure provide immunomodulatory fusion proteins comprising a collagen-binding domain that specifically binds collagen with an affinity (K_{D}) of less than about 500 nM as determined by a collagen-binding assay. In some embodiments, the collagen-binding domain specifically binds collagen with an affinity (K_{D}) of about 0.5-5 nM, 5-50 nM, or 50-500 nM as determined by a collagen-binding assay. In some embodiments, the collagen-binding domain specifically binds collagen with an affinity (K_{D}) of about 50-100 nM, 100-200 nM, 200-300 nM, 300-400 nM, or 400-500 nM as determined by a collagen-binding assay.

[0294] In some embodiments, the collagen-binding assay determines a binding affinity of the collagen-binding domain for collagen. In some embodiments, the collagen-binding assay determines a binding affinity of the collagen-binding domain for type I collagen. In some embodiments, the collagen-binding assay determines a binding affinity for type IV collagen.

[0295] In some embodiments, the collagen-binding assay is an ELISA. Methods and techniques to perform a collagen-binding ELISA are known in the art (see e.g., Smith et al., (2000) J Biol Chem 275:4205-4209). Accordingly, in some embodiments, the disclosure provides an immunomodulatory fusion protein comprising a collagen-binding domain that specifically binds collagen with an affinity (K_{D}) of less than about 0.5 nM as determined by an ELISA. Accordingly, in some embodiments, the disclosure provides an immunomodulatory fusion protein comprising a collagen-binding domain that specifically binds collagen with an affinity (K_{D}) of less than about 5 nM as determined by an ELISA. Accordingly, in some embodiments, the disclosure provides an immunomodulatory fusion protein comprising a collagen-binding domain that specifically binds collagen with an affinity (K_{D}) of less than about 50 nM as determined by an ELISA. Accordingly, in some embodiments, the disclosure provides an immunomodulatory fusion protein comprising a collagen-binding domain that specifically binds collagen with an affinity (K_{D}) of less than about 500 nM as determined by an ELISA. In some embodiments, the collagen-binding domain specifically binds collagen with an affinity (K_{D}) of about 0.5-5 nM, 4-40 nM, 50-500 nM as determined by an ELISA. In some embodiments, the collagen-binding domain specifically binds collagen with an affinity (K_{D}) of about 50-100 nM, 100-200 nM, 200-300 nM, 300-400 nM, or 400-500 nM as determined by an ELISA.

[0296] In some embodiments, the collagen-binding assay is a surface plasmon resonance (SPR) assay. Methods and techniques to perform a collagen-binding SPR assay are known in the art (see e.g., Saenko et al., (2002) Anal Biochem 302(2):252-262). Accordingly, in some embodiments, the disclosure provides an immunomodulatory fusion protein comprising a collagen-binding domain that specifically binds collagen with an affinity (K_{D}) of less than about 500 nM as determined by an SPR assay. In some embodiments, the collagen-binding domain specifically binds collagen with an affinity (K_{D}) of about 50-500 nM as determined by an SPR assay. In some embodiments, the collagen-binding domain specifically binds collagen with an affinity (K_{D}) of about 50-100 nM, 100-200 nM, 200-300 nM, 300-400 nM, or 400-500 nM as determined by an SPR assay.

[0297] The phrase “surface plasmon resonance” includes an optical phenomenon that allows for the analysis of real-time biospecific interactions by detection of alterations in protein concentrations within a biosensor matrix, for example using the BIAcore system (Pharmacia Biosensor AB, Uppsala, Sweden and Piscataway, N.J.). For further descriptions, see Jinsson, U., et al. (1993) Ann. Biol. Clin. 51:19-26; Jönsson, U., et al. (1991) Biotechniques 11:620-627; Johnsson, B., et al. (1995) J. Mol. Recognit. 8:125-131; and Johnnson, B., et al. (1991) Anal. Biochem. 198:268-277.

### E. Binding Specificity to Collagen

[0298] In some embodiments, the disclosure provides immunomodulatory fusion proteins comprising a collagen-binding domain that specifically binds collagen and does not specifically bind to one or more non-collagen extracellular matrix (ECM) components including, but not limited to, fibronectin, vitronectin, tenascin C, osteopontin and fibrinogen. In some embodiments, the collagen-binding domain binds to collagen with a lower K_{D} than to one or more non-collagen ECM components. In some embodiments, the K_{D} of the collagen-binding domain for type I collagen is less than the K_{D} of the collagen-binding domain for an extracellular matrix component selected from fibronectin, vitronectin, osteopontin, tenascin C, or fibrinogen. In some embodiments, the collagen-binding domain binds to collagen with about 10%, about 20%, about 30%, about 40%, about 50%, about 60%, about 70%, about 80%, about 90%, about 99% lower K_{D} than to one or more non-collagen ECM components. In some embodiments, the collagen-binding domain binds to collagen with about 2-fold, about 3-fold, about 4-fold, about 5-fold, about 10-fold lower K_{D} than to one or more non-collagen ECM components.

[0299] In some embodiments, the collagen-binding domain is not a promiscuous binder of ECM components. In some embodiments, the collagen-binding domain does not comprise a heparin-binding domain. In some embodiments, the collagen-binding domain is not a growth factor or portion thereof which binds extracellular matrix.

[0300] In some embodiments, the collagen-binding domain binds to type I collagen with a lower K_{D} than to type IV collagen. In some embodiments, the collagen-binding domain binds to type IV collagen with a lower K_{D} than to type I collagen.

[0301] In some embodiments, the collagen-binding domain competes with a reference collagen-binding domain for binding to collagen. In some embodiments, the collagen-binding domain competes with a reference collagen-binding domain for binding to type I collagen. In some embodiments, the collagen-binding domain competes with a reference collagen-binding domain for binding to type IV collagen. In some embodiments, the collagen-binding domain competes with a reference collagen-binding domain for binding to type I collagen and type IV collagen. In some embodiments, the collagen-binding domain competes with a reference collagen-binding domain for binding to type I collagen but not to type IV collagen. In some embodiments, the collagen-binding domain competes with a reference collagen-binding domain for binding to type IV collagen but not to type I collagen.

[0302] In some embodiments, the reference collagen-binding domain comprises one or more (e.g., two, three, four, five, six, seven, eight, nine, ten or more) leucine-rich repeats which bind collagen. In some embodiments, the reference collagen-binding domain comprises a proteoglycan. In some embodiments, the reference collagen-binding domain comprises a proteoglycan, wherein the proteoglycan is selected from the group consisting of: decorin, biglycan, fibromodulin, lumican, chondroadherin, asporin, PRELP, osteoadherin/osteomodulin, opticin, osteoglycin/mimecan, podocan, perlecan, nidogen. In some embodiments, the reference collagen-binding domain is lumican. In some embodiments, the reference collagen-binding domain comprises a class I small leucine-rich proteoglycan (SLRP). SLRPs are known to bind collagen (Chen and Birk (2013) FEBS Journal 2120-2137). In some embodiments, the reference collagen-binding domain comprises a class II SLRP. In some embodiments, the reference collagen-binding domain comprises a class III SLRP. In some embodiments, the reference collagen-binding domain comprises a class IV SLRP. In some embodiments, the reference collagen-binding domain comprises a class V SLRP. Further description of SLRP classes is disclosed in Schaefer & Iozzo (2008) J Biol Chem 283(31):21305-21309, which is incorporated herein by reference it its entirety.

[0303] In some embodiments, the reference collagen-binding domain comprises the leukocyte-associated immunoglobulin-like receptor 1 (LAIR-1) protein. In some embodiments, the reference collagen-binding domain comprises the leukocyte-associated immunoglobulin-like receptor 2 (LAIR-2) protein. In some embodiments, the reference collagen-binding domain comprises Glycoprotein IV.

### F. Exemplary Collagen-Binding Domains

[0304] In some embodiments, the collagen-binding domain comprises one or more (e.g., two, three, four, five, six, seven, eight, nine, ten or more) leucine-rich repeats which bind collagen. In some embodiments, the collagen-binding domain comprises a proteoglycan. In some embodiments, the collagen-binding domain comprises a proteoglycan, wherein the proteoglycan is selected from the group consisting of: decorin, biglycan, testican, bikunin, fibromodulin, lumican, chondroadherin, keratin, ECM2, epiphycan, asporin, PRELP, keratocan, osteoadherin, opticin, osteoglycan, nyctalopin, Tsukushi, podocan, podocan-like protein 1 versican, perlecan, nidogen, neurocan, aggrecan, and brevican.

[0305] In some embodiments, the collagen-binding domain comprises a class I small leucine-rich proteoglycan (SLRP). In some embodiments, the collagen-binding domain comprises a class II SLRP. In some embodiments, the collagen-binding domain comprises a class III SLRP. In some embodiments, the collagen-binding domain comprises a class IV SLRP. In some embodiments, the collagen-binding domain comprises a class V SLRP. Further description of SLRP classes is disclosed in Schaefer & Iozzo (2008) J Biol Chem 283(31):21305-21309, which is incorporated herein by reference it its entirety.

[0306] In some embodiments, the collagen-binding domain comprises one or more leucine-rich repeats from a human proteoglycan Class II member of the small leucine-rich proteoglycan (SLRP) family. In some embodiments, the SLRP is selected from lumican, decorin, biglycan, fibromodulin, keratin, epiphycan, asporin and osteoglycin. In some embodiments, the SLRP is lumican. In some embodiments, lumican comprises the amino acid sequence as set forth in SEQ ID NO: 107.

### Lumican

[0307] Lumican, also known as LUM, is an extracellular matrix protein that, in humans, is encoded by the LUM gene on chromosome 12 (Chakravarti et al., (1995) Genomics 27(3):481-488). Lumican is a proteoglycan Class II member of the small leucine-rich proteoglycan (SLRP) family that includes decorin, biglycan, fibromodulin, keratocan, epiphycan, and osteoglycin (Iozzo & Schaefer (2015) Matrix Biology 42:11-55).

[0308] Like the other SLRPs, lumican has a molecular weight of about 40 kDa and has four major intramolecular domains: 1) a signal peptide of 16 amino acid residues, 2) a negatively-charged N-terminal domain containing sulfated tyrosine and disulfide bond(s), 3) ten tandem leucine-rich repeats allowing lumican to bind to collagen, and 4) a carboxyl terminal domain of 50 amino acid residues containing two conserved cysteines 32 residues apart. Kao et al., (2006) Experimental Eye Research 82(1):3-4). There are four N-linked sites within the leucine-rich repeat domain of the protein core that can be substituted with keratan sulfate. The core protein of lumican (like decorin and fibromodulin) is horseshoe shaped. This enables it bind to collagen molecules within a collagen fibril, thus helping keep adjacent fibrils apart Scott (1996) Biochemistry 35(27): 8795-8799.

Leukocyte-Associated Immunoglobulin-Like Receptors (LAIR- and LAIR-2) Leukocyte-associated Ig-like receptor (LAIR)-1 is a collagen-receptor that inhibits immune cell function upon collagen binding. Next to LAIR-1, the human genome encodes LAIR-2, a soluble homolog. Human (h) LAIR-1 is expressed on the majority of PBMC and thymocytes (Maasho et al., (2005) Mol Immunol 42: 1521-1530). Cross-linking of hLAIR-1 by mAbs in vitro delivers a potent inhibitory signal that is capable of inhibiting immune cell function (4, 10-15). Collagens are known to be natural, high-affinity ligands for the LAIR molecules. Interaction of hLAIR-1 with collagens directly inhibits immune cell activation in vitro (Meyaard et al., (1997) Immunity 7:283-290; Poggi (1998) Eur J Immunol 28:2086-2091; Van der Vuurst de Vries et al., (1999) Eur J Immunol 29:3160-3167; Lebbink et al., (2006) J Exp Med 203:1419-1425).

[0309] In some embodiments, the collagen-binding domain comprises a human type I glycoprotein having an Ig-like domain, or an extracellular portion thereof which binds collagen. In some embodiments, the type I glycoprotein competes with lumican for binding for binding to collagen type I. In some embodiments, the human type I glycoprotein is selected from LAIR1, LAIR2, and Glycoprotein IV. In some embodiments, the human type I glycoprotein is LAIR1. In some embodiments, the human type I glycoprotein is LAIR1 and the collagen-binding domain comprises amino acid residues 22-122 of the amino acid sequence as set forth in SEQ ID NO: 98.

[0310] In some embodiments, the collagen-binding domain is a variant of LAIR1, LAIR2, or Glycoprotein IV. In some embodiments, the LAIR1 variant, LAIR2 variant, or Glycoprotein IV variant comprises one or more amino acid substitutions, additions or deletions (e.g., two, three, four, five, six, seven, eight, nine, ten or more) relative to the wild-type LAIR1, LAIR 2 or Glycoprotein IV protein sequence. In some embodiments, the collagen-binding domain is a LAIR1 variant comprising one or more amino acid substitutions, additions or deletions (e.g., two, three, four, five, six, seven, eight, nine, ten or more) relative to a LAIR1 protein comprising the amino acid sequence of SEQ ID NO: 98. In some embodiments, the collagen-binding domain is a LAIR1 variant comprising one or more amino acid substitutions, additions or deletions (e.g., two, three, four, five, six, seven, eight, nine, ten or more) in the LAIR1 binding pocket (e.g., a LAIR1 binding site comprising one or more residues E61, S66, Y68, I102, W109, Y115, R59, E63, R100, E111 and Q112, and combinations thereof) (Brondijk et al., (2010) Blood 115:1364-1373). In some embodiments, the collagen-binding domain is a LAIR1 variant comprising one or more amino acid substitutions, additions or deletions (e.g., two, three, four, five, six, seven, eight, nine, ten or more) outside the LAIR1 binding pocket.

[0311] In some embodiments, the collagen-binding domain is a LAIR1 variant having increased binding affinity to collagen relative to the collagen binding affinity of a wild-type LAIR1 protein. In some embodiments, the LAIR1 variant demonstrates an increase in binding affinity to collagen relative to the collagen binding affinity of a LAIR1 protein comprising the amino acid sequence of SEQ ID NO: 98. In some embodiments, the LAIR1 variant having decreased binding affinity to collagen relative to the collagen binding affinity of wild-type LAIR1 protein. In some embodiments, the LAIR1 variant demonstrates a decrease in binding affinity to collagen relative to the collagen binding affinity of a LAIR1 protein comprising the amino acid sequence of SEQ ID NO: 98.

### Glycoprotein IV (CD36)

[0312] In some embodiments, the collagen-binding domain comprises Glycoprotein IV (GPIV). Glycoprotein IV binds many ligands including collagen (Tandon (1989) J Biol Chem 264(13): 7576-7583). A multifunctional glycoprotein, GPIV acts as receptor for a broad range of ligands, including thrombospondin, fibronectin, collagen or amyloid-beta as well as of lipidic nature such as oxidized low-density lipoprotein (oxLDL), anionic phospholipids, long-chain fatty acids and bacterial diacylated lipopeptides. GPIV is a protein that in humans is encoded by the CD36 gene. The CD36 antigen is an integral membrane protein found on the surface of many cell types in vertebrate animals. It imports fatty acids inside cells and is a member of the class B scavenger receptor family of cell surface proteins. In some embodiments, the CD36 comprises the amino acid sequence set forth in SEQ ID NO: 100.

### II. Immunomodulatory Domain

[0313] The immunomodulatory fusion proteins disclosed herein comprise at least one immunomodulatory domain operably linked to a collagen-binding domain. In some embodiments, the immunomodulatory fusion protein comprises one, two, three, four, or five immunomodulatory domains. In some embodiments, when more than one immunomodulatory domain is present in the fusion protein, the immunomodulatory domains are the same. In some embodiments, when more than one immunomodulatory domain is present in the fusion protein, the immunomodulatory domains are different. In some embodiments, when more than one immunomodulatory domain is present in the fusion protein, each domain is located at the N terminus of a collagen-binding domain. In some embodiments, when more than one immunomodulatory domain is present in the fusion protein, each domain is located at the C terminus of a collagen-binding domain. In some embodiments, when more than one immunomodulatory domain is present in the fusion protein, at least one domain is located at the N terminus of a collagen-binding domain and at least one domain is located at the C terminus of the collagen-binding domain.

[0314] In some embodiments, the immunomodulatory domain activates the activity of a cell of the immune system. For example, in some embodiments the immunomodulatory domain is an immune response stimulatory, such as, but not limited to, a cytokine, such as an interleukin, a chemokine, a member of the TNF family, an agonistic antibody, an immune checkpoint blocker, or a combination thereof. In some embodiments, the immunomodulatory domain enhances an immune response. In some embodiments, enhancement of an immune response includes stimulation of T cells, stimulation of B cells, stimulation of dendritic cell responses, or a combination thereof. In some embodiments, enhancement of an immune response results in cytokine production, antibody production, antigen-specific immune cell (e.g., CD8+ T cells or CD4+ T cells) production, stimulation of Type I interferon responses, or combinations thereof.

[0315] In some embodiments, the immunomodulatory domain comprises a polypeptide that activates, enhances or promotes a response by an immune cell. In some embodiments, the immunomodulatory domain comprises a polypeptide that inhibits, reduces or suppresses a response by an immune cell. In some embodiments, the immune cell is a lymphoid cell, including but not limited to T cells, B cells, NK cells and innate lymphoid cells. In some embodiments, the immune cell is a myeloid cell, including but not limited to monocytes, neutrophils, macrophages, dendritic cells, mast cells and granulocytes.

[0316] In some embodiments, the response of the immune cell is cytokine production, antibody production, production of antigen-specific immune cells, or a combination thereof.

### A. Interleukins

[0317] In some embodiments, the immunomodulatory domain suitable for use in the immunomodulatory fusion proteins of the present disclosure, is an interleukin (IL). Interleukins are secreted proteins that bind to their specific receptors and play a role in the communication among leukocytes. Interleukins suitable for use as an immunomodulatory domain of the immunomodulatory fusion proteins include, but are not limited to: IL-2, IL-12, IL-15, IL-15 superagonist (IL-15SA), IL-21, IL-6, IL-5, IL-8, IL-7, IL-17, IL-23, IL-18, IL-1, IL-4, IL-3, IL-10, IL-13, and IL-9. In some embodiments, the interleukin suitable for use as an immunomodulatory domain comprises an amino acid sequence selected from SEQ ID NOs: 1-5 and 9-24. In some embodiments, the immunomodulatory domain is an IL-2 polypeptide. In some embodiments, the immunomodulatory domain is an IL-12 polypeptide. In some embodiments, the immunomodulatory domain is an IL-15 polypeptide. In some embodiments, the immunomodulatory domain is an IL-15SA polypeptide.

[0318] In some embodiments, the immunomodulatory domain is an interleukin polypeptide that binds to a common gamma chain receptor. Interleukins that bind the common gamma chain receptor include, but are not limited to, IL-2, IL-4, IL-7, IL-9, IL-13, IL-15, IL-15/IL-15R and IL-21.

[0319] In some embodiments, the immunomodulatory domain is a polypeptide belonging to the IL-12 family. The IL-12 family comprises heterodimeric ligands comprised of an α subunit with helical structure (e.g., IL-12p35, IL-23p19, IL-27p28) and a β subunit (e.g., IL-12p40, IL-23p40 (which is identical to IL-12p40), EBI3). Exemplary members include IL-12, IL-23, IL-27 and IL-35.

[0320] In some embodiments, the immunomodulatory domain is a polypeptide belonging to the IL-1 superfamily. The Interleukin-1 (IL-1) family consists of 11 structurally related family members (IL-1 α, IL-1-β, IL-1Ra, IL-18, IL-33 and IL-1F5 to IL-1 F10), that are among the most potent immune system signaling molecules, acting through a group of closely related receptors. All IL-1 receptors have a similar mode of activation: upon binding of ligand to the primary receptor subunit (i.e. IL-IR1 for IL-1 α and β, IL-18R for IL-18 and ST2 for IL-33), a second receptor subunit is recruited (i.e. IL-1RAP for IL-1 α and β, IL-18RAP for IL-18 and IL-1RAP for IL-33) and signaling is initiated via juxtaposition of the receptor subunits' cytoplasmic Toll/IL-1 receptor (TIR) domains. The dimerized TIR domains provide a docking platform for the MYD88 adaptor protein, which via recruitment of other intermediates leads to activation of the pro-inflammatory nuclear factor-κ B (NF-κB) and mitogen-activated protein kinase (MAPK) pathways. The IL-1 family members are primarily produced by innate immune cells and act on a variety of cell types during the immune response. Accordingly, in some embodiments the immunomodulatory domain is an IL-18 polypeptide.

### Interleukin-2 (IL-2)

[0321] In some embodiments, the immunomodulatory fusion protein comprises a member of the IL-2 family operably linked to a collagen binding domain, optionally via a linker. In some embodiments, the member of the IL-2 family is IL-2. Interleukin-2 (IL-2) is a cytokine that induces proliferation of antigen-activated T cells and stimulates natural killer (NK) cells. The biological activity of IL-2 is mediated through a multi-subunit IL-2 receptor complex (IL-2R) of three polypeptide subunits that span the cell membrane: p55 (IL-2Rα, the alpha subunit, also known as CD25 in humans), p75 (IL-2RP, the beta subunit, also known as CD 122 in humans) and p64 (IL-2Rγ, the gamma subunit, also known as CD 132 in humans). T cell response to IL-2 depends on a variety of factors, including: (1) the concentration of IL-2; (2) the number of IL-2R molecules on the cell surface; and (3) the number of IL-2R occupied by IL-2 (i.e., the affinity of the binding interaction between IL-2 and IL-2R (Smith, “Cell Growth Signal Transduction is Quantal” In Receptor Activation by Antigens, Cytokines, Hormones, and Growth Factors 766:263-271, 1995)). The IL-2:IL-2R complex is internalized upon ligand binding and the different components undergo differential sorting. IL-2Rα is recycled to the cell surface, while IL-2 associated with the IL-2:IL-2RPγ complex is routed to the lysosome and degraded. When administered as an intravenous (i.v.) bolus, IL-2 has a rapid systemic clearance (an initial clearance phase with a half-life of 12.9 minutes followed by a slower clearance phase with a half-life of 85 minutes) (Konrad et al., Cancer Res. 50:2009-2017, 1990).

[0322] Outcomes of systemic IL-2 administration in cancer patients are far from ideal. While 15 to 20 percent of patients respond objectively to high-dose IL-2, the great majority do not, and many suffer severe, life-threatening side effects, including nausea, confusion, hypotension, and septic shock. The severe toxicity associated with high-dose IL-2 treatment is largely attributable to the activity of natural killer (NK) cells. NK cells express the intermediate-affinity receptor, IL-2RPyγ_{c}, and thus are stimulated at nanomolar concentrations of IL-2, which do in fact result in patient sera during high-dose IL-2 therapy. Attempts to reduce serum concentration, and hence selectively stimulate IL-2RaPγ_{c}-bearing cells, by reducing dose and adjusting dosing regimen have been attempted, and while less toxic, such treatments were also less efficacious. Given the toxicity issues associated with high dose IL-2 cancer therapy, numerous groups have attempted to improve anti-cancer efficacy of IL-2 by simultaneously administering therapeutic antibodies. Yet, such efforts have been largely unsuccessful, yielding no additional or limited clinical benefit compared to IL-2 therapy alone. Accordingly, novel IL-2 therapies are needed to more effectively combat various cancers.

[0323] In some embodiments, the linking of IL-2 to a collagen-binding domain localizes the cytokine to a cell, and therefore prevents systemic toxicity. Further, in some embodiments, when administered directly to a tumor or lesion, the collagen-binding domain localizes the cytokine to the tumor or lesion microenvironment, thereby preventing systemic toxicity associated with IL-2 treatment.

[0324] In some embodiments, the IL-2 is a human recombinant IL-2 such as Proleukin® (aldesleukin). Proleukin® is a human recombinant interleukin-2 product produced in E. coli. Proleukin® differs from the native interleukin-2 in the following ways: a) it is not glycosylated; b) it has no N-terminal alanine; and c) it has serine substituted for cysteine at amino acid positions 125. Proleukin® exists as biologically active, non-covalently bound microaggregates with an average size of 27 recombinant interleukin-2 molecules. Proleukin® (aldesleukin) is administered by intravenous infusion. In some embodiments, IL-2 is wild-type IL-2 (e.g., human IL-2 in its precursor form or mature IL-2. In some embodiments, IL-2 comprises the amino acid sequence set forth in SEQ ID NO: 1.

[0325] In certain embodiments, IL-2 is mutated such that it has an altered affinity (e.g., a higher affinity) for the IL-2R alpha receptor compared with unmodified IL-2. Site-directed mutagenesis can be used to isolate IL-2 mutants that exhibit high affinity binding to CD25, i.e., IL-2Rα, as compared to wild-type IL-2. Increasing the affinity of IL-2 for IL-2Rα at the cell surface will increase receptor occupancy within a limited range of IL-2 concentration, as well as raise the local concentration of IL-2 at the cell surface.

[0326] In some embodiments, the disclosure features IL-2 mutants, which may be, but are not necessarily, substantially purified and which can function as high affinity CD25 binders. IL-2 is a T cell growth factor that induces proliferation of antigen-activated T cells and stimulation of NK cells. Exemplary IL-2 mutants which are high affinity binders include those described in WO2013/177187A2 (herein incorporated by reference in its entirety). Further exemplary IL-2 mutants with increased affinity for CD25 are disclosed in U.S. Pat. No. 7,569,215, the contents of which are incorporated herein by reference.

[0327] In some embodiments, the disclosure features IL-2 mutants with reduced binding affinity to CD25 relative to wild-type IL-2. In some embodiments, the IL-2 mutant does not bind to CD25.

[0328] In some embodiments, IL-2 mutants comprise an amino acid sequence that is at least 80% identical to SEQ ID NO: 1 that bind CD25. For example, some embodiments an IL-2 mutant has at least one mutation (e.g., a deletion, addition, or substitution of 1, 2, 3, 4, 5, 6, 7, 8, 9, 10, 11, 12, 13, 14, 15, 16, 17, 18, 19, 20, or more amino acid residues) that increases the affinity for the alpha subunit of the IL-2 receptor relative to wild-type IL-2. It should be understood that mutations identified in mouse IL-2 may be made at corresponding residues in full length human IL-2 (nucleic acid sequence (accession: NM000586); amino acid sequence (accession: P60568)) or human IL-2 without the signal peptide. Accordingly, in some embodiments, the IL-2 is human IL-2. In other embodiments, the IL-2 is a mutant human IL-2.

[0329] In some embodiments, IL-2 mutants are at least or about 50%, at least or about 65%, at least or about 70%, at least or about 80%, at least or about 85%, at least or about 87%, at least or about 90%, at least or about 95%, at least or about 97%, at least or about 98%, or at least or about 99% identical in amino acid sequence to wild-type IL-2 (in its precursor form or, preferably, the mature form). The mutation can consist of a change in the number or content of amino acid residues. For example, the IL-2 mutants can have a greater or a lesser number of amino acid residues than wild-type IL-2. Alternatively, or in addition, IL-2 mutants can contain a substitution of one or more amino acid residues that are present in the wild-type IL-2.

[0330] By way of illustration, a polypeptide that includes an amino acid sequence that is at least 95% identical to a reference amino acid sequence of SEQ ID NO: 1 is a polypeptide that includes a sequence that is identical to the reference sequence except for the inclusion of up to five alterations of the reference amino acid of SEQ ID NO: 1. For example, up to 5% of the amino acid residues in the reference sequence may be deleted or substituted with another amino acid, or a number of amino acids up to 5% of the total amino acid residues in the reference sequence may be inserted into the reference sequence. These alterations of the reference sequence may occur at the amino (N-) or carboxy (C-) terminal positions of the reference amino acid sequence or anywhere between those terminal positions, interspersed either individually among residues in the reference sequence or in one or more contiguous groups within the reference sequence.

[0331] The substituted amino acid residue(s) can be, but are not necessarily, conservative substitutions, which typically include substitutions within the following groups: glycine, alanine; valine, isoleucine, leucine; aspartic acid, glutamic acid; asparagine, glutamine; serine, threonine; lysine, arginine; and phenylalanine, tyrosine. These mutations can be at amino acid residues that contact IL-2Rα.

### Interleukin-12 (IL-12)

[0332] In some embodiments, the immunomodulatory fusion protein comprises an IL-12 polypeptide operably linked to a collagen binding domain, optionally via a linker. Interleukin-12 (IL-12) is a pro-inflammatory cytokine that plays an important role in innate and adaptive immunity. Gately, M K et al., Annu Rev Immunol. 16: 495-521 (1998). IL-12 functions primarily as a 70 kDa heterodimeric protein consisting of two disulfide-linked p35 and p40 subunits. The precursor form of the IL-12 p40 subunit (NM_002187; P29460; also referred to as IL-12B, natural killer cell stimulatory factor 2, cytotoxic lymphocyte maturation factor 2) is 328 amino acids in length, while its mature form is 306 amino acids long. The precursor form of the IL-12 p35 subunit (NM_000882; P29459; also referred to as IL-12A, natural killer cell stimulatory factor 1, cytotoxic lymphocyte maturation factor 1) is 219 amino acids in length and the mature form is 197 amino acids long. Id. The genes for the IL-12 p35 and p40 subunits reside on different chromosomes and are regulated independently of each other. Gately, M K et al., Annu Rev Immunol. 16: 495-521 (1998). Many different immune cells (e.g., dendritic cells, macrophages, monocytes, neutrophils, and B cells) produce IL-12 upon antigenic stimuli. The active IL-12 heterodimer is formed following protein synthesis. Id.

[0333] Due to its ability to activate both NK cells and cytotoxic T cells, IL-12 protein has been studied as a promising anti-cancer therapeutic since 1994. See Nastala, C. L. et al., J Immunol 153: 1697-1706 (1994). But despite high expectations, early clinical studies did not yield satisfactory results. Lasek W. et al., Cancer Immunol Immunother 63: 419-435, 424 (2014). Repeated administration of IL-12, in most patients, led to adaptive response and a progressive decline of IL-12-induced interferon gamma (IFNγ) levels in blood. Id. Moreover, while it was recognized that IL-12-induced anti-cancer activity is largely mediated by the secondary secretion of IFNγ, the concomitant induction of IFNγ along with other cytokines (e.g., TNF-α) or chemokines (IP-10 or MIG) by IL-12 caused severe toxicity. Id.

[0334] In addition to the negative feedback and toxicity, the marginal efficacy of the IL-12 therapy in clinical settings may be caused by the strong immunosuppressive environment in humans. Id. To minimize IFNγ toxicity and improve IL-12 efficacy, scientists tried different approaches, such as different dose and time protocols for IL-12 therapy. See Sacco, S. et al., Blood 90: 4473-4479 (1997); Leonard, J. P. et al., Blood 90: 2541-2548 (1997); Coughlin, C. M. et al., Cancer Res. 57: 2460-2467 (1997); Asselin-Paturel, C. et al., Cancer 91: 113-122 (2001); and Saudemont, A. et al., Leukemia 16: 1637-1644 (2002). Nonetheless, these approaches have not significantly impacted patient survival. Kang, W. K., et al., Human Gene Therapy 12: 671-684 (2001).

[0335] Membrane-anchored versions of IL-12 have been studied as a means of reducing toxicity associated with systemic administration, using retroviral and adenoviral vectors for expression in tumor cells. See Pan, W-Y. et al., Mol. Ther. 20(5): 927-937 (2012). But, the use of viral vectors presents a potential health risk, since the underlying viruses can act as oncogenes and the viral vectors can be immunogenic.

[0336] Accordingly, in some embodiments, the immunomodulatory fusion proteins disclosed herein comprise an IL-12 polypeptide operably linked to a collagen-binding domain. In some embodiments, the linking of an IL-12 polypeptide to a collagen-binding domain localizes the cytokine to a cell, and therefore prevents systemic toxicity. Further, in some embodiments, when administered directly to a tumor or lesion, the collagen-binding domain localizes the cytokine to the tumor or lesion microenvironment, thereby preventing systemic toxicity.

[0337] In some embodiments, the IL-12 polypeptide comprises IL-12A (e.g., SEQ ID NO: 3). In some embodiments, the IL-12 polypeptide comprises IL-12B (e.g., SEQ ID NO: 2). In some embodiments, the IL-12 polypeptide comprises both IL-12A and IL-12B.

[0338] In some embodiments, IL-12B is located N-terminal to IL-12A in the IL-12 polypeptide. In some embodiments, IL-12A is located N-terminal to IL-12B in the IL-12 polypeptide. The phrase “located N-terminal to” indicates location in a polypeptide with respect to other sequences in the polypeptide in relation to the N-terminus of the polypeptide. For example, IL-12B that is “N-terminal to” IL-12A means that IL-12B is located closer to the N-terminus of the IL-12 polypeptide than IL-12A.

[0339] In some embodiments, the IL-12 polypeptide comprises a single polypeptide chain comprising IL-12B and IL-12A, which are fused directly to one another or are linked to one another by a linker (referred to herein as an “subunit linker”). Non-limiting examples of linkers are disclosed elsewhere herein.

[0340] In some embodiments, the IL-12 polypeptide of the disclosure comprises IL-12A and/or IL-12B that is a variant, that is a functional fragment, or that contains a substitution, an insertion and/or an addition, a deletion, and/or a covalent modification with respect to a wild-type IL-12A or IL-12B sequence. In some embodiments, amino acid residues located at the carboxy, amino terminal, or internal regions of the IL-12 polypeptide are deleted, thereby providing for fragments.

[0341] In some embodiments, the IL-12 polypeptide comprises a substitutional variant of an IL-12A and/or IL-12B amino acid sequence, which can comprise one, two, three or more than three substitutions. In some embodiments, the substitutional variant can comprise one or more conservative amino acids substitutions. In other embodiments, the variant is an insertional variant. In other embodiments, the variant is a deletional variant.

[0342] As recognized by those skilled in the art, IL-12 protein fragments, functional protein domains, variants, and homologous proteins (orthologs) are also considered to be within the scope of the IL-12 polypeptides of the disclosure. Nonlimiting examples of IL-12 polypeptides suitable for use in the immunomodulatory fusion proteins disclosed herein are set forth in SEQ ID NOs: 2-3.

[0343] In some embodiments, the immunomodulatory fusion protein comprises an IL-12 polypeptide comprising the amino acid sequence set forth in SEQ ID NO: 2. In some embodiments, the immunomodulatory fusion protein comprises an IL-12 polypeptide comprising the amino acid sequence set forth in SEQ ID NO: 3. In some embodiments, the immunomodulatory fusion protein comprises an IL-12 polypeptide comprising the amino acid sequences set forth in SEQ ID NOs: 2 and 3.

### Interleukin-15 (IL-15)

[0344] In some embodiments, the immunomodulatory fusion protein comprises an IL-15 polypeptide operably linked to a collagen binding domain, optionally via a linker. IL-15 is a member of the 4-helix bundle family of cytokines and plays an important role in the development of an effective immune response. Waldmann, T. A., Cancer Immunol. Res. 3: 219-227 (2015). IL-15 is essential for the proper development of NK cells and long-term maintenance of memory CD8+ T cells. The IL-15 gene encodes a 162 amino acid preprotein having a signal peptide of 48 amino acids, with the mature protein being 114 amino acids in length. Bamford, R. N., et al., Proc. Natl. Acad. Sci. USA 93: 2897-2902 (1996). See also, e.g., GenBank Accession Numbers NM_000585 for the Homo sapiens IL15 transcript variant 3 mRNA sequence and NP_000576 for the corresponding IL15 isoform 1 preproprotein.

[0345] IL-15 shares certain structural similarity to interleukin-2 (IL-2). Like IL-2, IL-15 signals through the IL-2 receptor beta chain (CD122) and the common gamma chain (CD132). But, unlike IL-2, IL-15 cannot effectively bind CD122 and CD132 on its own. IL-15 must first bind to the IL-15 alpha receptor subunit (IL-15Rα). The IL-15Rα gene encodes a 267 amino acid preprotein having a signal peptide of 30 amino acids, with the mature protein being 237 amino acids in length. See, e.g., GenBank Accession Numbers NM_002189 for the Homo sapiens IL-15Rα transcript variant 1 mRNA and NP_002180 for the Homo sapiens IL-15Rα isoform 1 precursor amino acid sequence.

[0346] Human IL-15Rα is predominantly a transmembrane protein that binds to IL-15 on the surface of cells such as activated dendritic cells and monocytes. Waldmann, T. A., Cancer Immunol. Res. 3: 219-227 (2015). The membrane bound complex of IL-15/IL-15Rα then presents IL-15 in trans to CD122 and CD132 subunits. Accordingly, IL-15Rα is an essential component of IL-15 activity.

[0347] To overcome the short half-life of systemically injected IL-15, pre-complexation of IL-15 with soluble recombinant IL-15Rα, resulting in IL-15 superagonist (IL-15SA) has been shown to enhance the systemic potency of IL-15 by ˜50 fold, and also raises the half-life of the cytokine in serum following systemic injection to ˜20 hrs. (Stoklasek et al., J Immunol 177(9): 6072, 2006; Dubois et al., J Immunol 180(4): 2099, 2008; Rubinstein et. al. Proc Natl Acad Sci USA 103(24): 9166, 2006.)

[0348] Accordingly, in some embodiments, the immunomodulatory domain of the immunomodulatory fusion protein is an IL-15 polypeptide. In some embodiments, the IL-15 polypeptide comprises the amino acid sequence set forth in SEQ ID NO: 5. In some embodiments, the IL-15 polypeptide comprises the amino acid sequence set forth in SEQ ID NO: 4. In some embodiments, the IL-15 polypeptide is an IL-15 superagonist, comprising IL-15 and IL-15Rα. In some embodiments, the IL-15 superagonist comprises the amino acid sequences set forth in SEQ ID NOs: 4 and 5.

### B. Interferons

[0349] In some embodiments, the immunomodulatory domain suitable for use in the immunomodulatory fusion proteins of the present disclosure, is an interferon (IFN). Interferons comprise a family of secretory proteins induced in response to specific extracellular stimuli through stimulation of toll-like receptors (TLRs). In some embodiments, interferons heighten anti-viral defenses of the immune system (e.g., antigen presentation). Through high-affinity cell surface receptors, IFNs stimulate genes using signaling molecules. Interferons suitable for use as an immunomodulatory domain of the immunomodulatory fusion proteins include, but are not limited to: IFN-gamma and IFN-alpha.

[0350] In some embodiments, the immunomodulatory fusion protein comprises an IFN-gamma polypeptide operably linked to a collagen-binding domain. IFN-gamma is produced by a variety of immune cells, such as activated T cells and NK cells. IFN-gamma interacts with a specific receptor at the cell surface and activates signal transduction pathways that produce immunomodulatory effects. Accordingly, in some embodiments, the immunomodulatory domain is an IFN-gamma polypeptide. In some embodiments, the IFN-gamma polypeptide comprises the amino acid sequence set forth in SEQ ID NO: 7.

[0351] In some embodiments, the immunomodulatory fusion protein comprises an IFN-alpha polypeptide operably linked to a collagen-binding domain. IFN-alpha is produced by B lymphocytes, null lymphocytes and macrophages, and activates NK cells, along with having antiviral and antitumor activities. Accordingly, in some embodiments, the immunomodulatory domain is an IFN-alpha polypeptide. In some embodiments, the IFN-alpha polypeptide comprises the amino acid sequence set forth in SEQ ID NO: 6.

### C. Immune Cell Differentiation Stimulating Factors

[0352] In some embodiments, the immunomodulatory domain suitable for use in the immunomodulatory fusion proteins of the present disclosure, is an immune cell differentiation stimulating factor. In some embodiments, immune cell differentiation stimulating factors activate intracellular signaling pathways that drive hematopoietic progenitor cell differentiation, development and proliferation into specific subtypes of immune cells. Immune cell differentiation stimulating factors suitable for use in the immunomodulatory fusion proteins disclosed herein include, but are not limited to: GM-CSF (granulocyte-macrophage colony-stimulating factor), G-CSF (granulocyte colony-stimulating factor) and FLT3L (FMS-like tyrosine kinase 3 ligand).

[0353] In some embodiments, the immunomodulatory domain is a GM-CSF polypeptide. GM-CSF is a monomeric glycoprotein secreted by macrophages, T cells, mast cells, NK cells, endothelial cells and fibroblasts. In addition to having a function of growth stimulation and differentiation on hematopoietic precursor cells, GM-CSF has a variety of effects on immune cells expressing the GM-CSF receptor. In some embodiments, the GM-CSF polypeptide comprises the amino acid sequence set forth in SEQ ID NO: 27.

[0354] In some embodiments, the immunomodulatory domain is a FLT3L polypeptide. FLT3 is a receptor tyrosine kinase (RTK) which is expressed by immature hematopoietic precursor cells. FLT3L is a transmembrane protein or soluble protein and is expressed by a large number of cells, including hematopoietic cells and stroma cells in the bone marrow. In combination with other growth factors, FLT3L stimulates proliferation and development of various cells types, including myeloid and lymphoid precursor cells, dendritic cells and NK cells. In some embodiments, the FLT3L polypeptide comprises the amino acid sequence set forth in SEQ ID NO: 28.

[0355] In some embodiments, the immunomodulatory domain is an G-CSF polypeptide. In some embodiments, G-CSF regulates proliferation, differentiation and functional activation of neutrophilic granulocytes. In some embodiments, the G-CSF polypeptide comprises the amino acid sequence set forth in SEQ ID NO: 29.

### D. Chemokines

[0356] In some embodiments, the immunomodulatory domain suitable for use in the immunomodulatory fusion proteins of the present disclosure, is a chemokine. In some embodiments, chemokines are proteins that induce directed chemotaxis of a responsive cell (e.g., leukocytes). In general, chemokines are grouped into four subfamilies: CXC, CC, (X)C, and CX3C. In the CXC chemokines, one amino acid separates the first two cysteines (“the CXC motif”). ELR+CXC chemokines are ligands for CXCR1 and/or CXCR2 chemokine receptors, which are G-protein coupled seven transmembrane domain-type receptors that specifically bind ELR+CXC chemokines. The seven human ELR+CXC chemokines are human Gro-alpha (also known as CXCL1), human Gro-beta (also known as CXCL2), human Gro-gamma (also known as CXCL3), human ENA-78 (also known as CXCL5), human GCP-2 (also known as CXCL6), human NAP-2 (also known as CXCL7), and human IL-8 (also known as CXCL8). All ELR+CXC chemokines bind the CXCR2 receptor; moreover, some ELR+CXC chemokines bind both CXCR1 and CXCR2 receptors (i.e., CXCL6 and CXCL8), all of which contributes to redundancy in the activation pathways. The five murine ELR+CXC chemokines are keratinocyte chemoattractant (KC) (also known as CXCL1), Macrophage Inflammatory Protein-2 (MIP-2) (also known as CXCL2), dendritic cell inflammatory protein-1 (DCIP-1) (also known as CXCL3), lipopolysaccharide-induced CXC chemokine (LIX) (also known as CXCL5), and neutrophil activating peptide-2 (NAP-2) (also known as CXCL7).

[0357] Chemokines suitable for use in the immunomodulatory fusion protein disclosed herein include, but are not limited to: LIF, M-CSF, MIP-2, MIP-1beta, KP (CXLC1), MIG (CXCL9), IP-10 (CXCL10), MCP-1, eotaxin, RANTES, LIX and MIP-1alpha.

[0358] Amino acids encoding exemplary chemokines suitable for use as an immunomodulatory domain for the immunomodulatory fusion protein disclosed herein, are set forth below:

| | Amino acid sequence |
|---|---|
| Chemokine | (SEQ ID NO) |
| LIF | 30 |
| M-CSF | 31 |
| MIP-2 | 32 |
| MIP-1beta | 33 |
| KP (CXCL1) | 34 |
| MIG (CXCL9) | 35 |
| IP-10 (CXCL10) | 36 |
| MCP-1 | 37 |
| Eotaxin | 38 |
| RANTES | 39 |
| LIX | 40 |
| MIP-1alpha | 41 |

### E. Tumor Necrosis Factor (TNF) Superfamily

[0359] In some embodiments, the immunomodulatory domain suitable for use in the immunomodulatory fusion proteins of the present disclosure, is an extracellular domain of a member of the tumor necrosis factor (TNF) superfamily. The tumor necrosis factor super family of ligands and receptors are a series of structurally homologous cell surface proteins that signal via forming trimeric clusters of ligand-receptor complexes. Ligation of activating TNF superfamily receptors can lead to a wide range of pro-immune responses, including proliferation, enhanced effector function, and production of chemokines and cytokines. Some ligands, such as Fas, can lead to the induction of apoptosis and are expressed on the surface of immune cells. Additionally, other ligands function as inhibitory receptors which weaken the immune response. In some embodiments, the extracellular domain is derived from: TNF-alpha, LIGHT, LT-alpha, LT-beta, BTLA, CD160, CD40L, FasL, CD30L, 4-1BBL, CD27L, OX40L, TWEAK, APRIL, BAFF, RANKL, TRAIL, EDA1, EDA2 or GITRL. The extracellular domain is capable of binding the selected TNF superfamily member's receptor, thereby inducing or stimulating an immune response.

[0360] The following table shows the receptor corresponding to the derived extracellular domain:

| | | Amino acid sequence |
|---|---|---|
| | | of ligand extracellular |
| Ligand | Receptor | domain (SEQ ID NO) |
| TNF-alpha | TNFR1, TNFR2 | 51 |
| LIGHT | HEVM, LT-betaR | 52 |
| LT-alpha | TNFR1, TNFR2, HEVM | 53 |
| LT-beta | LT-BetaR | 54 |
| CD160 | HVEM | 56 |
| CD40L | CD40 | 57 |
| FasL | Fas | 58 |
| CD30L | CD30 | 59 |
| 4-1BBL | 4-1BB | 60 |
| CD27L | CD27 | 61 |
| OX40L | OX40 | 62 |
| TWEAK | Fn14 | 63 |
| APRIL | BCMA, TACI | 64 |
| BAFF | BCMA, TACI, BAFFR | 65 |
| RANKL | RANK, OPG | 66 |
| TRAIL | OPG, TRAIL R1 (DR4), TRAIL | 67 |
| | R2 (DR5), DcR1, DcR2 | |
| EDA1 | EDAR | 68 |
| EDA2 | XEDAR | 69 |
| GITRL | GITR | 70 |

### F. CD28 Family

[0361] In some embodiments, the immunomodulatory domain suitable for use in the immunomodulatory fusion proteins of the present disclosure, is an extracellular domain of a member of the CD28 family. The CD28 family is a family of inhibitory (PD 1, CTLA-4) and activating (CD28, ICOS) receptors that bind to members of the B7 family of ligands. CD28 is a co-stimulatory receptor that provides the second signal required to activate naive T cells (along with ligation of the TCR) and has two natural ligands, CD80 and CD86. CD28 signaling can serve to increase proliferation, effector function, and anti-apoptotic signaling. CD28 signaling has recently been shown to be required in effective PD1/PDL1 blockade. ICOS (Inducible T cell Costimulator) is a closely related surface receptor that is expressed on activated T cells and displays similar functions as CD28.

[0362] Accordingly, in some embodiments, the immunomodulatory domain is an extracellular domain of CD80 (B7-1). In some embodiments, the immunomodulatory domain comprises the amino acid sequence set forth in SEQ ID NO: 71.

[0363] Accordingly, in some embodiments, the immunomodulatory domain is an extracellular domain of CD86 (B7-2), capable of binding CD28. In some embodiments, the immunomodulatory domain comprises the amino acid sequence set forth in SEQ ID NO: 72.

[0364] Accordingly, in some embodiments, the immunomodulatory domain is an extracellular domain of ICOSLG. In some embodiments, the immunomodulatory domain comprises the amino acid sequence set forth in SEQ ID NO: 73.

### G. Agonistic Antibodies

[0365] In some embodiments, the immunomodulatory domain suitable for use in the immunomodulatory fusion proteins of the present disclosure, is an agonistic antibody, or antigen binding fragment thereof. Agonistic antibodies activate their target of interest, in contrast to antagonistic antibodies which block the function of their target. In some embodiments, the agonistic antibodies, or antigen binding fragments thereof, bind to immune activating receptors.

[0366] In some embodiments, immune activating receptors include, but are not limited to: tumor necrosis factor (TNF) receptors, CD28 family members, T-cell receptors (TCRs), Killer cell Ig-Like receptors (KIRs), Leukocyte Ig-Like receptors (LIRs), CD94/NKG2 receptors, Fc receptors, signaling lymphocytic activation molecules (SLAMs), and activating Siglec receptors.

### Tumor Necrosis Factor (TNF) Superfamily

[0367] In some embodiments, the immunomodulatory domain suitable for use in the immunomodulatory fusion proteins of the present disclosure, is an agonistic antibody, or antigen binding fragment thereof, that binds to a tumor necrosis factor (TNF) superfamily member receptor. The TNF superfamily is described supra. For example, in some embodiments, the immunomodulatory domain is an agonistic antibody, or antigen binding fragment, that binds to TNFR1, thereby activating the receptor.

[0368] The following table provides a list of TNF superfamily member receptors that agonistic antibodies, or antigen binding fragments thereof, can be generated to target, suitable for use in the immunomodulatory fusion protein described herein:

| Ligand | Receptor | Receptor Uniprot KB |
|---|---|---|
| TNF-alpha | TNFR1 | P19438 |
| | TNFR2 | P20333 |
| LIGHT | HEVM | Q92956 |
| | LT-betaR | Q06643 |
| LT-alpha | TNFR1 | P19438 |
| | TNFR2 | P20333 |
| | HEVM | Q92956 |
| LT-beta | LT-BetaR | Q06643 |
| CD160 | HVEM | Q92956 |
| CD40L | CD40 | P25942 |
| FasL | Fas | P25445 |
| CD30L | CD30 | P28908 |
| 4-1BBL | 4-1BB | Q07011 |
| CD27L | CD27 | P26842 |
| OX40L | OX40 | P43489 |
| TWEAK | Fn14 | Q9NP84 |
| APRIL | BCMA | Q02223 |
| | TACI | O14836 |
| BAFF | BCMA | Q02223 |
| | TACI | O14836 |
| | BAFFR | Q96RJ3 |
| RANKL | RANK | Q9Y6Q6 |
| | OPG | O00300 |
| TRAIL | OPG | O00300 |
| | TRAIL R1 (DR4) | O00220 |
| | TRAIL R2 (DR5) | O14763 |
| | DcR1 | O14798 |
| | DcR2 | Q9UBN6 |
| EDA1 | EDAR | Q9UNE0 |
| EDA2 | XEDAR | Q9HAV5 |
| GITRL | GITR | Q9Y5U5 |

[0369] In some embodiments, the immunomodulatory domain is an anti-4-1BB agonist antibody. In some embodiments, the immunomodulatory domain is an anti-OX40 agonist antibody. In some embodiments, the immunomodulatory domain is a CD40 agonist antibody.

### CD28 Receptor Superfamily

[0370] In some embodiments, the immunomodulatory domain suitable for use in the immunomodulatory fusion proteins of the present disclosure, is an agonistic antibody, or antigen binding fragment thereof, that binds to a CD28 superfamily receptor. The CD28 superfamily is described supra. For example, in some embodiments, the immunomodulatory domain is an agonistic antibody, or antigen binding fragment, that binds to CD28, thereby activating the receptor.

[0371] The following table provides a list of CD28 superfamily member receptors that agonistic antibodies, or antigen binding fragments thereof, can be generated to target, suitable for use in the immunomodulatory fusion protein described herein:

| Ligand | Receptor | Receptor Uniprot KB |
|---|---|---|
| CD80 (B7-1) | CD28 | P10747 |
| CD86 (B7-2) | CD28 | P10747 |
| ICOSLG | ICOS | Q9Y6W8 |

### T Cell Receptor (TCR) Complex

[0372] In some embodiments, the immunomodulatory domain suitable for use in the immunomodulatory fusion proteins of the present disclosure, is an agonistic antibody, or antigen binding fragment thereof, that binds to a T-cell Receptor (TCR) complex. The T-cell Receptor (TCR) is the cell surface receptor responsible for imparting antigen specificity to T-cells. Each TCR is specific for a particular peptide presented either by MHC Class I (for CD8+ T cells) or MHC Class II (for CD4+ T cells). For naive T cells, ligation of the TCR provides the first of two signals required to activate the T cell. TCR ligation of CD8+ T cells leads to death of the cell displaying the cognate pMHC (and potentially bystander cells) via release of soluble factors, such as perforin and granzyme B, as well as upregulation of apoptosis inducing ligands, such as Fas ligand. For CD4+ helper T cells, ligation of the TCR with its cognate pMHC results in the release of cytokines,

[0373] Accordingly, in some embodiments, the immunomodulatory domain is an agonistic antibody, or antigen binding fragment thereof, that binds to a TCR. For example, in some embodiments, the immunomodulatory domain is an agonistic antibody, or antigen binding fragment, that binds to CD3γ, thereby activating the receptor.

[0374] The following table provides a list of members of TCR complexes that agonistic antibodies, or antigen binding fragments thereof, can be generated to target, suitable for use in the immunomodulatory fusion protein described herein:

| TCR Binder | TCR Complex Member | Member Uniprot KB |
|---|---|---|
| pMHC | CD3γ | P09693 |
| pMHC | CD3δ | P04234 |
| pMHC | CD3ζ | P20963 |
| pMHC | CD3ε | P07766 |

### Killer Cell Ig-Like Receptor (KIR)

[0375] In some embodiments, the immunomodulatory domain suitable for use in the immunomodulatory fusion proteins of the present disclosure, is an agonistic antibody, or antigen binding fragment thereof, that binds to a Killer Cell Ig-Like Receptor (KIR). The killer cell immunoglobulin like receptor (KIR) is a family of receptors expressed mainly on NK cells and on some subsets of T cells. These receptors are primarily responsible through recognition of self (and therefore inhibitory function), by binding to MHC class I (HLA-A, HLA-B, and HLA-C) molecules. These receptors can be either activating or inhibitory, depending on the length of the cytoplasmic tail. Inhibitory receptors have a longer tail and contain an ITIM domain. Activating KIRs have a shorter cytoplasmic domain and associate with DAP12 to mediate signaling.

[0376] Activating KIRs are provided in the table below, in which agonistic antibodies, or antigen binding fragments thereof, can be generated to target, suitable for use in the immunomodulatory fusion protein described herein:

| Ligand | Receptor | Receptor Uniprot KB |
|---|---|---|
| HLA molecules | KIR 2DS1 | Q14954 |
| HLA molecules | KIR 2DS2 | P43631 |
| HLA molecules | KIR 2DS3 | Q14952 |
| HLA molecules | KIR 2DS4 | P43632 |
| HLA molecules | KIR 2DS5 | Q14953 |
| HLA molecules | KIR 3DS1 | Q14943 |

### Leukocyte Ig-Like Receptor (LIR)

[0377] In some embodiments, the immunomodulatory domain suitable for use in the immunomodulatory fusion proteins of the present disclosure, is an agonistic antibody, or antigen binding fragment thereof, that binds to a leukocyte Ig-Like receptor (LIR). LIR receptors are a class of immune receptors expressed primarily on innate immune cells. Their primary ligand is MHC Class I molecules and they largely exhibit inhibitory functions, although some have activating functions. LIRA2, for example, acts as an innate sensor of immunoglobulin fragments that have been cleaved by microbial proteases.

[0378] In some embodiments, the immunomodulatory domain is an agonistic antibody, or antigen binding fragment thereof, that binds to LIRA2. In some embodiments, antibodies capable of binding to LIRA2 can be generated based on Uniprot ID Q8N149.

### CD94/NKG2 Receptor Family

[0379] In some embodiments, the immunomodulatory domain suitable for use in the immunomodulatory fusion proteins of the present disclosure, is an agonistic antibody, or antigen binding fragment thereof, that binds to a CD94/NKG2 receptor. CD94/NKG2 are heterodimer C-type lectin receptors that are expressed on the surface of NK cells and some subsets of CD8 T cells. They bind to HLA-E molecules (non-classical MHC Class I molecules) and can transmit both inhibitory and activating signals to NK Cells. Inhibitory receptors contain ITIM domains in their cytoplasmic tails, while activating receptors associate with DAP12 and DAP10 which contain ITAM domains.

[0380] Activating CD94/NKG2 receptors are provided in the table below, in which agonistic antibodies, or antigen binding fragments thereof, can be generated to target, suitable for use in the immunomodulatory fusion protein described herein.

[0381] In some embodiments, the immunomodulatory domain suitable for use in the immunomodulatory fusion proteins of the present disclosure is an extracellular domain of a CD94/NKG2 ligand. The following table shows the receptor corresponding to the derived extracellular domain.

| | | | Amino acid sequence |
|---|---|---|---|
| | | Receptor | of ligand extracellular |
| Ligand | Receptor | Uniprot KB | domain (SEQ ID NO) |
| MICA | CD94 | Q13241 | 74 |
| | NKG2D | P26718 | |
| MICB | CD94 | Q13241 | 75 |
| | NKG2D | P26718 | |
| ULBP1 | CD94 | Q13241 | 76 |
| | NKG2D | P26718 | |
| ULBP2 | CD94 | Q13241 | 77 |
| | NKG2D | P26718 | |
| ULBP3 | CD94 | Q13241 | 78 |
| | NKG2D | P26718 | |
| ULBP4 | CD94 | Q13241 | 79 |
| | NKG2D | P26718 | |
| ULBP5, isoform 1 | CD94 | Q13241 | 80 |
| | NKG2D | P26718 | |
| ULBP5, isoform 2 | CD94 | Q13241 | 81 |
| | NKG2D | P26718 | |
| ULBP6 | NKG2D | P26718 | 82 |
| | NKG2C | P26717 | |
| | NKG2E | Q07444 | |
| | NKG2H | O43908 | |
| | CD94 | Q13241 | |

### Fc Receptors

[0382] In some embodiments, the immunomodulatory domain suitable for use in the immunomodulatory fusion proteins of the present disclosure, is an agonistic antibody, or antigen binding fragment thereof, that binds to an Fc receptor. Fc receptors are immune cell receptors expressed primarily on innate immune cells which bind to the constant region of antibodies and elicit a wide range of functions. Fc receptors are almost exclusively activating (except for Fc γ RIIB, which transmits inhibitory signals). Fc receptor ligation can lead to ADCC, phagocytosis, degranulation, and the transmission of activating signals which increase effector function.

[0383] The following table provides a list of Fc receptors that agonistic antibodies, or antigen binding fragments thereof, can be generated to target, suitable for use in the immunomodulatory fusion protein described herein:

| Ligand | Receptor | Receptor Uniprot KB |
|---|---|---|
| IgG | FcγRI | P12314 |
| IgG | FcγRIIC | P31995 |
| IgG | FcγRIIIA | P12318 |
| IgG | FcγRIIIB | P31994 |
| IgE | FcεRI | P30273 |
| IgE | FcεRII | P06734 |
| IgA | FcαR | P24071 |
| IgA/IgM | FcμR | Q8WWV6 |

### Signaling Lymphocytic Activation Molecules (SLAM)

[0384] In some embodiments, the immunomodulatory domain suitable for use in the immunomodulatory fusion proteins of the present disclosure, is an agonistic antibody, or antigen binding fragment thereof, that binds to a signaling lymphocytic activation molecule (SLAM) receptor. SLAM receptors are a series of molecules that function both as receptors and ligands. SLAM molecules interact with one another on adjacent cells to send either activating or inhibitory signals. SLAM molecules contain Immunoreceptor Tyrosine based Swith motifs in their cytoplasmic tails, allowing them to associate with both activating and inhibitory signaling molecules intracellularly.

[0385] The following table provides a list of SLAM receptors that agonistic antibodies, or antigen binding fragments thereof, can be generated to target, suitable for use in the immunomodulatory fusion protein described herein.

[0386] In some embodiments, the immunomodulatory domain suitable for use in the immunomodulatory fusion proteins of the present disclosure is an extracellular domain of a SLAM ligand. The following table shows the receptor corresponding to the derived extracellular domain.

| | | | Amino acid sequence |
|---|---|---|---|
| | | | of ligand extracellular |
| Ligand | Receptor | Receptor Uniprot KB | domain (SEQ ID NO) |
| SLAMF1 | SLAMF1 | Q13291 | 83 |
| SLAMF2 | SLAMF2 | P09326 | 84 |
| SLAMF3 | SLAMF3 | Q9HBG7 | 85 |
| SLAMF4 | SLAMF4 | Q9BZW8 | 86 |
| SLAMF5 | SLAMF5 | Q9UIB8 | 87 |
| SLAMF6 | SLAMF6 | Q96DU3 | 88 |
| SLAMF7 | SLAMF7 | Q9NQ25 | 89 |

[0387] Siglec Family Receptors

[0388] In some embodiments, the immunomodulatory domain suitable for use in the immunomodulatory fusion proteins of the present disclosure, is an agonistic antibody, or antigen binding fragment thereof, that binds to a Siglec family receptor. Siglecs are a family of surface receptors found mainly on immune cells that are part of the lectin family (sugar binding proteins). These receptors bind to sialic acid containing ligands. These receptors function mainly as inhibitory receptors on a wide range of immune cell types, although some (siglec 14, 15, and 16) contain an ITAM activating domain.

[0389] Activating Siglec receptors are provided in the table below, in which agonistic antibodies, or antigen binding fragments thereof, can be generated to target, suitable for use in the immunomodulatory fusion protein described herein:

| Receptor | Receptor Uniprot KB |
|---|---|
| Siglec 14 | Q08ET2 |
| Siglec 15 | Q6ZMC9 |
| Siglec 16 | A6NMB1 |

### H. Antagonistic Antibodies

[0390] In some embodiments, the immunomodulatory domain suitable for use in the immunomodulatory fusion proteins of the present disclosure, is an antagonistic antibody, or antigen binding fragment thereof. Antagonistic antibodies block the function of their target. In some embodiments, the antagonistic antibodies, or antigen binding fragments thereof, bind to immune inhibitory receptors, thereby allowing for the induction of an immune response. In some embodiments, the antagonistic antibodies, or antigen binding fragments thereof, bind to immune inhibitory ligands, thereby allowing for the induction of an immune response. In some embodiments, immune inhibitor receptors and ligands include, but are not limited to: CD28 receptors, tumor necrosis factor (TNF) superfamily receptors, Siglec receptors, CD94/NKG2 receptors, Leukocyte Ig-Like receptors (LIRs), Killer Cell Ig-Like receptors (KIRs), Fc receptors, adenosine pathway molecules, other checkpoint inhibitors, and LAIR1.

### CD28 Molecules

[0391] In some embodiments, the immunomodulatory domain suitable for use in the immunomodulatory fusion proteins of the present disclosure, is an antagonistic antibody, or antigen binding fragment thereof, that binds a CD28 molecule. As described supra, the CD28 family includes both activating and inhibitory molecules. Accordingly, in some embodiments, antagonizing the inhibitory molecules results in an induction or stimulation of immune responses.

[0392] The following table provides a list of CD28 molecules that antagonistic antibodies, or antigen binding fragments thereof, can be generated to target, suitable for use in the immunomodulatory fusion protein described herein.

| Molecule | Molecule Uniprot KB |
|---|---|
| PD1 | Q15116 |
| PDL1 | Q9NZQ7 |
| PDL2 | Q9BQ51 |
| CTLA-4 | P16410 |
| B7-H4 | Q7Z7D3 |
| B7-H3 | Q5ZPR3 |

[0393] In some embodiments, the immunomodulatory domain is an antagonistic antibody, or antigen binding fragment thereof, that binds PD-1. In some embodiments, the immunomodulatory domain is an antagonistic antibody, or antigen binding fragment thereof, that binds PD-L1. In some embodiments, the immunomodulatory domain is an antagonistic antibody, or antigen binding fragment thereof, that binds CTLA-4.

### TNF Superfamily Molecules

[0394] In some embodiments, the immunomodulatory domain suitable for use in the immunomodulatory fusion proteins of the present disclosure, is an antagonistic antibody, or antigen binding fragment thereof, that binds a TNF superfamily member. As described supra, the TNF superfamily includes both activating and inhibitory molecules. Accordingly, in some embodiments, antagonizing the inhibitory molecules results in an induction or stimulation of immune responses.

[0395] The following table provides a list of TNF superfamily molecules that antagonistic antibodies, or antigen binding fragments thereof, can be generated to target, suitable for use in the immunomodulatory fusion protein described herein.

| Molecule | Molecule Uniprot KB |
|---|---|
| TIGIT | Q495A1 |
| BTLA | Q7Z6A9 |

### Siglec Receptors

[0396] In some embodiments, the immunomodulatory domain suitable for use in the immunomodulatory fusion proteins of the present disclosure, is an antagonistic antibody, or antigen binding fragment thereof, that binds a Siglec receptor. As described supra, the Siglec family includes both activating and inhibitory molecules. Accordingly, in some embodiments, antagonizing the inhibitory molecules results in an induction or stimulation of immune responses.

[0397] The following table provides a list of Siglec receptors that antagonistic antibodies, or antigen binding fragments thereof, can be generated to target, suitable for use in the immunomodulatory fusion protein described herein.

| Receptor | Receptor Uniprot KB |
|---|---|
| Siglec 1 (siualoadhesion) | Q9BZZ2 |
| Siglec 2 (CD22) | P20273 |
| Siglec 3 (CD33) | P20138 |
| Siglec 4a (MAG) | P20916 |
| Siglec 5 | O15389 |
| Siglec 6 | O43699 |
| Siglec 7 | Q9Y286 |
| Siglec 8 | Q9NYZ4 |
| Siglec 9 | Q9Y336 |
| Siglec 10 | Q96LC7 |
| Siglec 11 | Q96RL6 |
| Siglec 12 | Q96PQ1 |

### CD94/NKG2 Receptors

[0398] In some embodiments, the immunomodulatory domain suitable for use in the immunomodulatory fusion proteins of the present disclosure, is an antagonistic antibody, or antigen binding fragment thereof, that binds a CD94/NKG2 receptors. As described supra, the CD94/NKG2 family includes both activating and inhibitory molecules. Accordingly, in some embodiments, antagonizing the inhibitory molecules results in an induction or stimulation of immune responses.

[0399] Accordingly, in some embodiments, the immunomodulatory domain is an antagonistic antibody, or antigen binding fragment thereof, that binds CD94/NKG2A. In some embodiments, such antibodies are generated based on UniProt ID P26715.

[0400] In some embodiments, the immunomodulatory domain is an antagonistic antibody, or antigen binding fragment thereof, that binds CD94/NKG2B. In some embodiments, such antibodies are generated based on UniProt ID Q13241.

### Leukocyte Ig-Like Receptors (LIRs)

[0401] In some embodiments, the immunomodulatory domain suitable for use in the immunomodulatory fusion proteins of the present disclosure, is an antagonistic antibody, or antigen binding fragment thereof, that binds a Leukocyte Ig-Like Receptors (LIR). As described supra, the LIR family includes both activating and inhibitory molecules. Accordingly, in some embodiments, antagonizing the inhibitory molecules results in an induction or stimulation of immune responses.

[0402] The following table provides a list of LIRs that antagonistic antibodies, or antigen binding fragments thereof, can be generated to target, suitable for use in the immunomodulatory fusion protein described herein.

| Receptor | Receptor Uniprot KB |
|---|---|
| LIRB1 | Q8NHL6 |
| LIRB2 | Q8N423 |
| LIRB3 | O75022 |
| LIRB4 | Q8NHJ6 |

### Killer Cell Ig-Like Receptors (KIRs)

[0403] In some embodiments, the immunomodulatory domain suitable for use in the immunomodulatory fusion proteins of the present disclosure, is an antagonistic antibody, or antigen binding fragment thereof, that binds a Killer Cell Ig-Like Receptor (KIR). As described supra, the KIR family includes both activating and inhibitory molecules. Accordingly, in some embodiments, antagonizing the inhibitory molecules results in an induction or stimulation of immune responses.

[0404] The following table provides a list of KIRs that antagonistic antibodies, or antigen binding fragments thereof, can be generated to target, suitable for use in the immunomodulatory fusion protein described herein.

| Receptor | Receptor Uniprot KB |
|---|---|
| KIR 2DL1 | P43626 |
| KIR 2DL2 | P43627 |
| KIR 2DL3 | P43628 |
| KIR 2DL4 | Q99706 |
| KIR 2DL5A | Q8N109 |
| KIR 2DL5B | Q8NHK3 |
| KIR 3DL1 | P43629 |
| KIR 3DL2 | P43630 |
| KIR 3DL3 | Q8N743 |

### Fc Receptors

[0405] In some embodiments, the immunomodulatory domain suitable for use in the immunomodulatory fusion proteins of the present disclosure, is an antagonistic antibody, or antigen binding fragment thereof, that binds an Fc receptor. As described supra, the family of Fc receptors includes both activating and inhibitory molecules. Accordingly, in some embodiments, antagonizing the inhibitory molecules results in an induction or stimulation of immune responses.

[0406] In some embodiments, the inhibitor Fc receptor is Fc γ RIIB. In some embodiments, the immunomodulatory domain is an antagonistic antibody, or antigen binding fragment thereof, that binds Fc γ RIIB. In some embodiments, such antibodies are generated based on UniProt ID P31994.

### Adenosine Pathway Molecules

[0407] In some embodiments, the immunomodulatory domain suitable for use in the immunomodulatory fusion proteins of the present disclosure, is an antagonistic antibody, or antigen binding fragment thereof, that binds a member of the adenosine pathway. For example, CD39 and CD73 are enzymes expressed on the surface of cells which catalyze the transformation of ATP into adenosine. Extracellular ATP is a danger molecule which elicits an immune response, while adenosine is immunosuppressive. These molecules contribute to a locally immunosuppressive environment by generating adenosine.

[0408] Accordingly, in some embodiments, the immunomodulatory domain is an antagonistic antibody, or antigen binding fragment thereof, that binds CD39. In some embodiments, such antibodies are generated based on UniProt ID P49961.

[0409] In some embodiments, the immunomodulatory domain is an antagonistic antibody, or antigen binding fragment thereof, that binds CD73. In some embodiments, such antibodies are generated based on UniProt ID P21589.

### Other Checkpoint Inhibitors

[0410] In some embodiments, the immunomodulatory domain suitable for use in the immunomodulatory fusion proteins of the present disclosure, is an antagonistic antibody, or antigen binding fragment thereof, that binds an immune checkpoint inhibitor. In some embodiments, by antagonizing such immune checkpoint inhibitors, an immune response is induced or stimulated.

[0411] The following table provides a list of immune checkpoint inhibitors that antagonistic antibodies, or antigen binding fragments thereof, can be generated to target, suitable for use in the immunomodulatory fusion protein described herein.

| Molecule | Molecule Uniprot KB |
|---|---|
| VISTA | Q9H7M9 |
| TIM-3 | Q8TDQ0 |
| LAG-3 | P18627 |
| CD47 | Q08722 |
| SIRPα | P78324 |

### III. Linkers

[0412] In some embodiments, the immunomodulatory fusion protein comprises an immunomodulatory domain operably linked to a collagen-binding protein via a linker. In some embodiments, the linker between the immunomodulatory domain and the collagen-binding protein provides a steric separation such that the immunomodulatory domain retains its activity (e.g., promote receptor/ligand engagement). In some embodiments, the linker between the immunomodulatory domain and the collagen-binding protein is of sufficient length or mass to reduce adsorption of the immunomodulatory domain onto collagen fibrils. Methods for measuring adsorption are known to those of skill in the art. For example, adsorption can be measured by ellipsometry (ELM), surface plasmon resonance (SPR), optical waveguide lightmode spectroscopy (OWLS), attenuated total internal reflectance-infrared spectroscopy (ATR-IR), circular dichroism spectroscopy (CD), total internal reflectance-infrared spectroscopy (TIRF), and other high resolution microscopy techniques. In some embodiments, these methods show the spatial arrangement between the domains of the immunomodulatory fusion protein.

[0413] In some embodiments, the linker between the immunomodulatory domain and the collagen-binding protein provides sufficient molecular weight to slow or reduce diffusion from the tissue. Methods for measuring diffusion from the tissue are known to those of skill in the art. For example, diffusion can be measured by in vivo imagining, or via microscopy of tissue sections over time. Exemplary methods are described in at least Schmidt & Wittrup, Mol Canc Ther. 2009′ and Wittrup et al., Methods in Enzymol 2012, each of which is herein incorporated by reference in their entirety.

[0414] In some embodiments, the linker is a hydrophilic polypeptide comprising “N” amino acids in length, wherein N=1-1000, 50-800, 100-600, or 200-500.

### A. Serum Albumin

[0415] In some embodiments, the linker is a serum albumin, or fragments thereof. Methods of fusing serum albumin to proteins are disclosed in, e.g., US2010/0144599, US2007/0048282, and US2011/0020345, which are herein incorporated by reference in their entirety. In some embodiments, the linker is human serum albumin (HSA), or variants or fragments thereof, such as those disclosed in U.S. Pat. No. 5,876,969, WO 2011/124718, WO 2013/075066, and WO 2011/0514789.

[0416] Suitable albumins for use in the immunomodulatory fusion proteins can be from human, primate, rodent, bovine, equine, donkey, rabbit, goat, sheep, dog, chicken, or pig. In some embodiments, the albumin is a serum albumin, for example, a human serum albumin (SEQ ID NO: 42, primate serum albumin (e.g., chimpanzee serum albumin, gorilla serum albumin), rodent serum albumin (e.g., hamster serum albumin, guinea pig serum albumin, mouse albumin and rat serum albumin), bovine serum albumin, equine serum albumin, donkey serum albumin, rabbit serum albumin, goat serum albumin, sheep serum albumin, dog serum albumin, chicken serum albumin and pig serum albumin.

[0417] In some embodiments, the albumin, or a variant or fragment thereof, has a sequence identity to the sequence of wild-type HSA as set forth in SEQ ID NO: 42 of at least 50%, such as at least 60%, at least 70%, at least 80%, at least 85%, at least 86%, at least 87%, at least 88%, at least 89%, at least 90%, at least 91%, at least 92%, at least 93%, at least 94%, at least 95%, at least 96%, at least 97%, at least 98%, or at least 99%.

[0418] In some embodiments, the number of alterations, e.g., substitutions, insertions, or deletions, in an albumin variants is 1-20, e.g., 1-10 and 1-5, such as 1, 2, 3, 4, 5, 6, 7, 8, 9 or 10 alterations compared to the corresponding wild-type albumin (e.g., HSA).

[0419] In some embodiments, fragments of albumin, or fragments of variants thereof, are suitable for use in the immunomodulatory fusion proteins. Exemplary albumin fragments are disclosed in WO 2011/124718. In some embodiments, a fragment of albumin (e.g., a fragment of HSA) is at least 20 amino acids in length, such as at least 40 amino acids, at least 60 amino acids, at least 80 amino acids, at least 100 amino acids, at least 150 amino acids, at least 200 amino acids, at least 300 amino acids, at least 400 amino acids, or at least 500 amino acids in length.

[0420] In some embodiments, an albumin fragment may comprise at least one whole sub-domain of albumin. Domains of HSA have been expressed as recombinant proteins (Dockal et al., JBC 1999; 274:9303-10), where domain I was defined as consisting of amino acids 1-197 (SEQ ID NO: 116), domain II was defined as consisting of amino acids 189-385 (SEQ ID NO: 117), and domain III was defined as consisting of amino acids 381-585 (SEQ ID NO: 118) of HSA (SEQ ID NO: 42). Partial overlap of the domains occurs given the extended α-helix structure (h10-h1) which exists between domains I and II, and between domains II and III (Peters, 1996, op. cit, Table 2-4). HSA also comprises six sub-domains (sub-domains IA, IB, NA, NB, INA and NIB). Sub-domain IA comprises amino acids 6-105, sub-domain IB comprises amino acids 120-177, sub-domain NA comprises amino acids 200-291, sub-domain NB comprises amino acids 316-369, sub-domain INA comprises amino acids 392-491 and sub-domain NIB comprises amino acids 512-583 of SEQ ID NO: 42

[0421] In some embodiments, a fragment comprises a whole or part of one or more domains or sub-domains as defined above, or any combination of those domains and/or sub-domains. In some embodiments, an albumin fragment comprises at least 50, 60, 70, 75, 80, 85, 90, 95, 96, 97, 98, or 99% of an albumin or of a domain of an albumin, or a variant or fragment thereof.

### B. Fc Domains

[0422] In some embodiments, the linker suitable for use in the immunomodulatory fusion protein described herein is an Fc domain. In some embodiments, the Fc domain is a component of the agonist or antagonist antibodies described supra, and therefore a separate Fc domain is not needed.

[0423] In certain embodiments, the Fc domain comprises the amino acid sequence set forth in SEQ ID NO: 115. In some embodiments, the Fc domain does not contain a variable region that binds to antigen. In some embodiments, the Fc domain contains a variable region that binds to antigen. Fc domains suitable for the immunomodulatory fusion proteins disclosed herein may be obtained from a number of different sources. In certain embodiments, an Fc domain is derived from a human immunoglobulin. In certain embodiments, the Fc domain is from a human IgG1 constant region. The Fc domain of human IgG1 is set forth in SEQ ID NO: 115. It is understood, however, that the Fc domain may be derived from an immunoglobulin of another mammalian species, including for example, a rodent (e.g. a mouse, rat, rabbit, guinea pig) or non-human primate (e.g. chimpanzee, macaque) species. Moreover, the Fc domain or portion thereof may be derived from any immunoglobulin class, including IgM, IgG, IgD, IgA, and IgE, and any immunoglobulin isotype, including IgG1, IgG2, IgG3, and IgG4.

[0424] In some embodiments, the immunomodulatory fusion protein comprises a mutant Fc domain. In some embodiments, the immunomodulatory fusion protein comprises a mutant, IgG1 Fc domain. In some embodiments, a mutant Fc domain comprises one or more mutations in the hinge, CH2, and/or CH3 domains. In some aspects, a mutant Fc domain includes a D265A mutation.

[0425] A variety of Fc domain gene sequences (e.g., mouse and human constant region gene sequences) are available in the form of publicly accessible deposits. Constant region domains comprising an Fc domain sequence can be selected lacking a particular effector function and/or with a particular modification to reduce immunogenicity. Many sequences of antibodies and antibody-encoding genes have been published and suitable Fc domain sequences (e.g. hinge, CH2, and/or CH3 sequences, or portions thereof) can be derived from these sequences using art recognized techniques. The genetic material obtained using any of the foregoing methods may then be altered or synthesized to obtain polypeptides suitable for use in the methods disclosed herein. It will further be appreciated that the scope of this disclosure encompasses alleles, variants and mutations of constant region DNA sequences.

[0426] Fc domain sequences can be cloned, e.g., using the polymerase chain reaction and primers which are selected to amplify the domain of interest. To clone an Fc domain sequence from an antibody, mRNA can be isolated from hybridoma, spleen, or lymph cells, reverse transcribed into DNA, and antibody genes amplified by PCR. PCR amplification methods are described in detail in U.S. Pat. Nos. 4,683,195; 4,683,202; 4,800,159; 4,965,188; and in, e.g., “PCR Protocols: A Guide to Methods and Applications” Innis et al. eds., Academic Press, San Diego, Calif. (1990); Ho et al. 1989. Gene 77:51; Horton et al. 1993. Methods Enzymol. 217:270. PCR may be initiated by consensus constant region primers or by more specific primers based on the published heavy and light chain DNA and amino acid sequences. As discussed above, PCR also may be used to isolate DNA clones encoding the antibody light and heavy chains. In this case the libraries may be screened by consensus primers or larger homologous probes, such as mouse constant region probes. Numerous primer sets suitable for amplification of antibody genes are known in the art (e.g., 5′ primers based on the N-terminal sequence of purified antibodies (Benhar and Pastan. 1994. Protein Engineering 7: 1509); rapid amplification of cDNA ends (Ruberti, F. et al. 1994. J. Immunol. Methods 173:33); antibody leader sequences (Larrick et al. Biochem Biophys Res Commun 1989; 160: 1250). The cloning of antibody sequences is further described in Newman et al., U.S. Pat. No. 5,658,570, filed Jan. 25, 1995, which is herein incorporated by reference.

[0427] In some embodiments, the immunomodulatory fusion protein disclosed comprises one or more Fc domains (e.g., 2, 3, 4, 5, 6, 7, 8, 9, 10, or more Fc domains). In certain embodiments, the Fc domains may be of different types. In certain embodiments, at least one Fc domain present in the immunomodulatory fusion protein comprises a hinge domain or portion thereof. In certain embodiments, the immunomodulatory fusion protein comprises at least one Fc domain which comprises at least one CH2 domain or portion thereof. In certain embodiments, the immunomodulatory fusion protein comprises at least one Fc domain which comprises at least one CH3 domain or portion thereof. In certain embodiments, the immunomodulatory fusion protein comprises at least one Fc domain which comprises at least one CH4 domain or portion thereof. In certain embodiments, the immunomodulatory fusion protein comprises at least one Fc domain which comprises at least one hinge domain or portion thereof and at least one CH2 domain or portion thereof (e.g., in the hinge-CH2 orientation). In certain embodiments, the immunomodulatory fusion protein comprises at least one Fc domain which comprises at least one CH2 domain or portion thereof and at least one CH3 domain or portion thereof (e.g., in the CH2-CH3 orientation). In certain embodiments, the immunomodulatory fusion protein comprises at least one Fc domain comprising at least one hinge domain or portion thereof, at least one CH2 domain or portion thereof, and least one CH3 domain or portion thereof, for example in the orientation hinge-CH2-CH3, hinge-CH3-CH2, or CH2-CH3-hinge.

[0428] In certain embodiments, immunomodulatory fusion protein comprises at least one complete Fc region derived from one or more immunoglobulin heavy chains (e.g., an Fc domain including hinge, CH2, and CH3 domains, although these need not be derived from the same antibody). In certain embodiments, immunomodulatory fusion protein comprises at least two complete Fc domains derived from one or more immunoglobulin heavy chains. In certain embodiments, the complete Fc domain is derived from a human IgG immunoglobulin heavy chain (e.g., human IgG1).

[0429] In certain embodiments, the immunomodulatory fusion protein comprises at least one Fc domain comprising a complete CH3 domain. In certain embodiments, the immunomodulatory fusion protein comprises at least one Fc domain comprising a complete CH2 domain. In certain embodiments, the immunomodulatory fusion protein comprises at least one Fc domain comprising at least a CH3 domain, and at least one of a hinge region, and a CH2 domain. In certain embodiments, the immunomodulatory fusion protein comprises at least one Fc domain comprising a hinge and a CH3 domain. In certain embodiments, the immunomodulatory fusion protein comprises at least one Fc domain comprising a hinge, a CH2, and a CH3 domain. In certain embodiments, the Fc domain is derived from a human IgG immunoglobulin heavy chain (e.g., human IgG1).

[0430] The constant region domains or portions thereof making up an Fc domain of the immunomodulatory fusion protein may be derived from different immunoglobulin molecules. For example, a polypeptide suitable for use in the immunomodulatory fusion proteins disclosed herein may comprise a CH2 domain or portion thereof derived from an IgG1 molecule and a CH3 region or portion thereof derived from an IgG3 molecule. In some embodiments, the immunomodulatory fusion protein comprises an Fc domain comprising a hinge domain derived, in part, from an IgG1 molecule and, in part, from an IgG3 molecule. As set forth herein, it will be understood by one of ordinary skill in the art that an Fc domain may be altered such that it varies in amino acid sequence from a naturally occurring antibody molecule.

[0431] In certain embodiments, the immunomodulatory fusion protein lacks one or more constant region domains of a complete Fc region, i.e., they are partially or entirely deleted. In certain embodiments, the immunomodulatory fusion protein lacks an entire CH2 domain. In certain embodiments, the immunomodulatory fusion protein comprises CH2 domain-deleted Fc regions derived from a vector (e.g., from IDEC Pharmaceuticals, San Diego) encoding an IgG1 human constant region domain (see, e.g., WO02/060955A2 and WO02/096948A2). This exemplary vector is engineered to delete the CH2 domain and provide a synthetic vector expressing a domain-deleted IgG1 constant region. It will be noted that these exemplary constructs are preferably engineered to fuse a binding CH3 domain directly to a hinge region of the respective Fc domain.

[0432] In other constructs it may be desirable to provide a peptide spacer between one or more constituent Fc domains. For example, a peptide spacer may be placed between a hinge region and a CH2 domain and/or between a CH2 and a CH3 domain. For example, compatible constructs could be expressed wherein the CH2 domain has been deleted and the remaining CH3 domain (synthetic or unsynthetic) is joined to the hinge region with a 1-20, 1-10, or 1-5 amino acid peptide spacer. Such a peptide spacer may be added, for instance, to ensure that the regulatory elements of the constant region domain remain free and accessible or that the hinge region remains flexible. Preferably, any linker peptide compatible used in the instant disclosure will be relatively non-immunogenic and not prevent proper folding of the Fc.

[0433] In certain embodiments, an Fc domain employed in the immunomodulatory fusion protein is altered or modified, e.g., by amino acid mutation (e.g., addition, deletion, or substitution). As used herein, the term “Fc domain variant” refers to an Fc domain having at least one amino acid modification, such as an amino acid substitution, as compared to the wild-type Fc from which the Fc domain is derived. For example, wherein the Fc domain is derived from a human IgG1 antibody, a variant comprises at least one amino acid mutation (e.g., substitution) as compared to a wild type amino acid at the corresponding position of the human IgG1 Fc region.

[0434] In certain embodiments, the Fc variant comprises a substitution at an amino acid position located in a hinge domain or portion thereof. In certain embodiments, the Fc variant comprises a substitution at an amino acid position located in a CH2 domain or portion thereof. In certain embodiments, the Fc variant comprises a substitution at an amino acid position located in a CH3 domain or portion thereof. In certain embodiments, the Fc variant comprises a substitution at an amino acid position located in a CH4 domain or portion thereof.

[0435] In certain embodiments, the immunomodulatory fusion protein comprises an Fc variant comprising more than one amino acid substitution. The immunomodulatory fusion protein may comprise, for example, 2, 3, 4, 5, 6, 7, 8, 9, 10 or more amino acid substitutions in the Fc domain. Preferably, the amino acid substitutions are spatially positioned from each other by an interval of at least 1 amino acid position or more, for example, at least 2, 3, 4, 5, 6, 7, 8, 9, or 10 amino acid positions or more. More preferably, the engineered amino acids are spatially positioned apart from each other by an interval of at least 5, 10, 15, 20, or 25 amino acid positions or more.

[0436] In some embodiments, an Fc domain includes changes in the region between amino acids 234-238, including the sequence LLGGP at the beginning of the CH2 domain. In some embodiments, an Fc variant alters Fc mediated effector function, particularly ADCC, and/or decrease binding avidity for Fc receptors. In some aspects, sequence changes closer to the CH2-CH3 junction, at positions such as K322 or P331 can eliminate complement mediated cytotoxicity and/or alter avidity for FcR binding. In some embodiments, an Fc domain incorporates changes at residues P238 and P331, e.g., changing the wild type prolines at these positions to serine. In some embodiments, alterations in the hinge region at one or more of the three hinge cysteines, to encode CCC, SCC, SSC, SCS, or SSS at these residues can also affect FcR binding and molecular homogeneity, e.g., by elimination of unpaired cysteines that may destabilize the folded protein.

[0437] Other amino acid mutations in the Fc domain are contemplated to reduce binding to the Fc gamma receptor and Fc gamma receptor subtypes. For example, mutations at positions 238, 239, 248, 249, 252, 254, 255, 256, 258, 265, 267, 268, 269, 270, 272, 279, 280, 283, 285, 298, 289, 290, 292, 293, 294, 295, 296, 298, 301, 303, 305, 307, 312, 315, 322, 324, 327, 329, 330, 331, 333, 334, 335, 337, 338, 340, 356, 360, 373, 376, 378, 379, 382, 388, 389, 398, 414, 416, 419, 430, 434, 435, 437, 438 or 439 of the Fc region can alter binding as described in U.S. Pat. No. 6,737,056, issued May 18, 2004, incorporated herein by reference in its entirety. This patent reported that changing Pro331 in IgG3 to Ser resulted in six fold lower affinity as compared to unmutated IgG3, indicating the involvement of Pro331 in Fc gamma RI binding. In addition, amino acid modifications at positions 234, 235, 236, and 237, 297, 318, 320 and 322 are disclosed as potentially altering receptor binding affinity in U.S. Pat. No. 5,624,821, issued Apr. 29, 1997 and incorporated herein by reference in its entirety.

[0438] Further mutations contemplated for use include, e.g., those described in U.S. Pat. App. Pub. No. 2006/0235208, published Oct. 19, 2006 and incorporated herein by reference in its entirety. Additionally, mutations described in U.S. Pat. App. Pub. No. 2006/0235208, incorporated herein by reference in its entirety, are contemplated for use. The mutant L234A/L235A is described, e.g., in U.S. Pat. App. Pub. No. 2003/0108548, published Jun. 12, 2003 and incorporated herein by reference in its entirety. In embodiments, the described modifications are included either individually or in combination. In certain embodiments, the mutation is D265A in human IgG1.

[0439] In certain embodiments, the immunomodulatory fusion protein comprises an Fc variant comprising an amino acid substitution which alters the antigen-dependent effector functions of the polypeptide, in particular ADCC or complement activation, e.g., as compared to a wild type Fc region. Such immunomodulatory fusion protein exhibit decreased binding to FcR gamma when compared to wild-type polypeptides and, therefore, mediate reduced effector function. Fc variants with decreased FcR gamma binding affinity are expected to reduce effector function, and such molecules are also useful, for example, for treatment of conditions in which target cell destruction is undesirable, e.g., where normal cells may express target molecules, or where chronic administration of the polypeptide might result in unwanted immune system activation.

[0440] In certain embodiments, the immunomodulatory fusion protein exhibits altered binding to an activating FcγR (e.g. Fcγl, Fcγlla, or FcγRIIIa). In certain embodiments, the immunomodulatory fusion protein exhibits altered binding affinity to an inhibitory FcγR (e.g. FcγRIIb). Exemplary amino acid substitutions which altered FcR or complement binding activity are disclosed in International PCT Publication No. WO05/063815 which is incorporated by reference herein.

[0441] In some embodiments, the immunomodulatory fusion protein comprises an amino acid substitution which alters the glycosylation of the fusion protein. For example, in some embodiments, the Fc domain comprises a mutation leading to reduced glycosylation (e.g., N- or O-linked glycosylation) or comprises an altered glycoform of the wild-type Fc domain (e.g., a low fucose or fucose-free glycan). In certain embodiments, the immunomodulatory fusion protein has an amino acid substitution near or within a glycosylation motif, for example, an N-linked glycosylation motif that contains the amino acid sequence NXT or NXS. Exemplary amino acid substitutions which reduce or alter glycosylation are disclosed in WO05/018572 and US2007/0111281, the contents of which are incorporated by reference herein. In certain embodiments, the immunomodulatory fusion protein comprises at least one Fc domain having engineered cysteine residue or analog thereof which is located at the solvent-exposed surface. In certain embodiments, the immunomodulatory fusion protein comprise an Fc domain comprising at least one engineered free cysteine residue or analog thereof that is substantially free of disulfide bonding with a second cysteine residue. Any of the above engineered cysteine residues or analogs thereof may subsequently be conjugated to a functional domain using art-recognized techniques (e.g., conjugated with a thiol-reactive heterobifunctional linker).

[0442] In certain embodiments, the immunomodulatory fusion protein comprises a genetically fused Fc domain having two or more of its constituent Fc domains independently selected from the Fc domains described herein. In certain embodiments, the Fc domains are the same. In certain embodiments, at least two of the Fc domains are different. For example, the Fc domains comprise the same number of amino acid residues or they may differ in length by one or more amino acid residues (e.g., by about 5 amino acid residues (e.g., 1, 2, 3, 4, or 5 amino acid residues), about 10 residues, about 15 residues, about 20 residues, about 30 residues, about 40 residues, or about 50 residues). In certain embodiments, the Fc domains differ in sequence at one or more amino acid positions. For example, at least two of the Fc domains may differ at about 5 amino acid positions (e.g., 1, 2, 3, 4, or 5 amino acid positions), about 10 positions, about 15 positions, about 20 positions, about 30 positions, about 40 positions, or about 50 positions).

### C. Additional Linkers

[0443] In some embodiments, the linker suitable for use in the immunomodulatory fusion protein described herein is a polyethylene glycol (PEG) domain. PEG is a well-known, water soluble polymer that is commercially available or can be prepared by ring-opening polymerization of ethylene glycol according to methods well known in the art (Sandler and Karo, Polymer Synthesis, Academic Press, New York, Vol. 3, pages 138-161). The term “PEG” is used broadly to encompass any polyethylene glycol molecule, and can be represented by the formula: X-0(CH₂CH₂0)ₙ₋₁CH₂CH₂OH, where n is 20 to 2300 and X is H or a terminal modification, e.g., a C₁₋₄ alkyl. In certain embodiments, the PEG suitable for use in the methods disclosed herein terminates on one end with hydroxy or methoxy, i.e., X is H or CH₃ (“methoxy PEG”). PEG can contain further chemical groups which are necessary for binding reactions; which results from the chemical synthesis of the molecule; or which is a spacer for optimal distance of parts of the molecule. In addition, such a PEG can consist of one or more PEG side-chains which are linked together. PEGs with more than one PEG chain are called multiarmed or branched PEGs. Branched PEGs can be prepared, for example, by the addition of polyethylene oxide to various polyols, including glycerol, pentaerythriol, and sorbitol. For example, a four-armed branched PEG can be prepared from pentaerythriol and ethylene oxide. Branched PEG are described in, for example, EP-A 0 473 084 and U.S. Pat. No. 5,932,462, both of which are hereby incorporated by reference. One form of PEGs includes two PEG side-chains (PEG2) linked via the primary amino groups of a lysine (Monfardini et al., Bioconjugate Chem 1995; 6:62-9).

[0444] In certain embodiments, PEG is conjugated to a cysteine moiety at the N- or C-terminus of the domains of the immunomodulatory fusion protein (e.g., immunomodulatory domain and collagen-binding domain). A PEG moiety may also be attached by other chemistry, including by conjugation to amines. PEG conjugation to peptides or proteins generally involves the activation of PEG and coupling of the activated PEG-intermediates directly to target proteins/peptides or to a linker, which is subsequently activated and coupled to target proteins/peptides (see Abuchowski et al., JBC 1977; 252:3571 and JBC 1977; 252:3582, and Harris et. al., in: Poly(ethylene glycol) Chemistry: Biotechnical and Biomedical Applications; (J. M. Harris ed.) Plenum Press: New York, 1992; Chap. 21 and 22). A variety of molecular mass forms of PEG can be selected, e.g., from about 1,000 Daltons (Da) to 100,000 Da (n is 20 to 2300). The number of repeating units “n” in the PEG is approximated for the molecular mass described in Daltons.

[0445] One skilled in the art can select a suitable molecular mass for PEG, e.g., based on at least the molecular mass of the immunomodulatory fusion protein without PEG.

[0446] In certain embodiments, PEG molecules may be activated to react with amino groups on the domains such as with lysines (Bencham C. O. et al., Anal. Biochem., 131, 25 (1983); Veronese, F. M. et al., Appl. Biochem., 11, 141 (1985); Zalipsky, S. et al., Polymeric Drugs and Drug Delivery Systems, adrs 9-110 ACS Symposium Series 469 (1999); Zalipsky, S. et al., Europ. Polym. J., 19, 1177-1183 (1983); Delgado, C. et al., Biotechnology and Applied Biochemistry, 12, 119-128 (1990)).

[0447] In certain embodiments, carbonate esters of PEG are used to conjugate PEG. N,N′-disuccinimidylcarbonate (DSC) may be used in the reaction with PEG to form active mixed PEG-succinimidyl carbonate that may be subsequently reacted with a nucleophilic group of a linker or an amino group of IL-2 (see U.S. Pat. Nos. 5,281,698 and 5,932,462). In a similar type of reaction, 1,1′-(dibenzotriazolyl)carbonate and di-(2-pyridyl)carbonate may be reacted with PEG to form PEG-benzotriazolyl and PEG-pyridyl mixed carbonate (U.S. Pat. No. 5,382,657), respectively. Pegylation can be performed according to the methods of the state of the art, for example by reaction of IL-2 with electrophilically active PEGs (Shearwater Corp., USA, www.shearwatercorp.com). Preferred PEG reagents suitable for use in the methods disclosed herein are, e.g., N-hydroxysuccinimidyl propionates (PEG-SPA), butanoates (PEG-SBA), PEG-succinimidyl propionate or branched N-hydroxysuccinimides such as mPEG2-NHS (Monfardini, C, et al., Bioconjugate Chem. 6 (1995) 62-69).

[0448] In some embodiments, the linker suitable for use in the immunomodulatory fusion protein described herein is transferrin, as disclosed in U.S. Pat. Nos. 7,176,278 and 8,158,579, which are herein incorporated by reference in their entirety.

[0449] In some embodiments, the linker suitable for use in the immunomodulatory fusion protein described herein is a serum immunoglobulin binding protein such as those disclosed in US2007/0178082, which is herein incorporated by reference in its entirety.

[0450] In some embodiments, the linker suitable for use in the immunomodulatory fusion protein described herein is a globulin such as thyroxine-binding globulin, a2 macroglobulin, or haptoglobulin.

[0451] In some embodiments, the linker suitable for use in the immunomodulatory fusion protein described herein is a fibronectin (Fn)-based scaffold domain protein, such as those disclosed in US2012/0094909, which is herein incorporated by reference in its entirety. Methods of making fibronectin-based scaffold domain proteins are also disclosed in US2012/0094909. A non-limiting example of an Fn3-based extended-PK group is Fn3(HSA).

### D. Other Linkers

[0452] In some embodiments, the immunomodulatory domain is operably linked to a collagen-binding domain via a linker, e.g., a gly-ser linker. In some embodiments, the immunomodulatory domain is operably linked to a collagen-binding domain via a linker (e.g., serum albumin), wherein the linker is linked to the collagen-binding domain and immunomodulatory domain via additional linkers (e.g. gly-ser linker). Linkers suitable for fusing the collagen-binding domain and immunomodulatory domain, or for fusing the collagen-binding domain, the immunomodulatory domain, and the linker (e.g., serum albumin) are well known in the art, and are disclosed in, e.g., US2010/0210511 US2010/0179094, and US2012/0094909, which are herein incorporated by reference in its entirety. Exemplary linkers include gly-ser polypeptide linkers, glycine-proline polypeptide linkers, and proline-alanine polypeptide linkers. In certain embodiments, the linker is a gly-ser polypeptide linker, i.e., a peptide that consists of glycine and serine residues.

[0453] Exemplary gly-ser polypeptide linkers comprise the amino acid sequence Ser(Gly₄Ser)n. In certain embodiments, n=1. In certain embodiments, n=2. In certain embodiments, n=3, i.e., Ser(Gly₄Ser)3. In certain embodiments, n=4, i.e., Ser(Gly₄Ser)4. In certain embodiments, n=5. In certain embodiments, n=6. In certain embodiments, n=7. In certain embodiments, n=8. In certain embodiments, n=9. In certain embodiments, n=10. Another exemplary gly-ser polypeptide linker comprises the amino acid sequence Ser(Gly₄Ser)n. In certain embodiments, n=1. In certain embodiments, n=2. In certain embodiments, n=3. In certain embodiments, n=4. In certain embodiments, n=5. In certain embodiments, n=6. Another exemplary gly-ser polypeptide linker comprises (Gly₄Ser)n. In certain embodiments, n=1. In certain embodiments, n=2. In certain embodiments, n=3. In certain embodiments, n=4. In certain embodiments, n=5. In certain embodiments, n=6. Another exemplary gly-ser polypeptide linker comprises (Gly₃Ser)n. In certain embodiments, n=1. In certain embodiments, n=2. In certain embodiments, n=3. In certain embodiments, n=4. In certain embodiments, n=5. In certain embodiments n=6.

[0454] Other linkers that are suitable for use in the immunomodulatory fusion proteins are known in the art, for example, the serine-rich linkers disclosed in U.S. Pat. No. 5,525,491, the helix forming peptide linkers (e.g., A(EAAAK)nA (n=2-5))(SEQ ID NO: 200) disclosed in Arai et al., Protein Eng 2001; 14:529-32, and the stable linkers disclosed in Chen et al., Mol Pharm 2011; 8:457-65, i.e., the dipeptide linker LE, a thrombin-sensitive disulfide cyclopeptide linker, and the alpha-helix forming linker LEA(EAAAK)₄ALEA(EAAAK)₄ALE (SEQ ID NO: 119).

[0455] Other exemplary linkers include GS linkers (i.e., (GS)n), GGSG (SEQ ID NO: 201) linkers (i.e., (GGSG)n)(SEQ ID NO: 202), GSAT linkers (SEQ ID NO: 203), SEG linkers, and GGS linkers (i.e., (GGSGGS)n)(SEQ ID NO: 204), wherein n is a positive integer (e.g., 1, 2, 3, 4, or 5). Other suitable linkers for use in the hybrid nuclease-albumin molecules can be found using publicly available databases, such as the Linker Database (ibi.vu.nl/programs/linkerdbwww). The Linker Database is a database of inter-domain linkers in multi-functional enzymes which serve as potential linkers in novel fusion proteins (see, e.g., George et al., Protein Engineering 2002; 15:871-9).

[0456] It will be understood that variant forms of these exemplary polypeptide linkers can be created by introducing one or more nucleotide substitutions, additions or deletions into the nucleotide sequence encoding a polypeptide linker such that one or more amino acid substitutions, additions or deletions are introduced into the polypeptide linker. Mutations may be introduced by standard techniques, such as site-directed mutagenesis and PCR-mediated mutagenesis.

[0457] Polypeptide linkers of the disclosure are at least one amino acid in length and can be of varying lengths. In one embodiment, a polypeptide linker of the disclosure is from about 1 to about 50 amino acids in length. As used in this context, the term “about” indicates +/− two amino acid residues. Since linker length must be a positive integer, the length of from about 1 to about 50 amino acids in length, means a length of from 1 to 48-52 amino acids in length. In another embodiment, a polypeptide linker of the disclosure is from about 10-20 amino acids in length. In another embodiment, a polypeptide linker of the disclosure is from about 15 to about 50 amino acids in length.

[0458] In another embodiment, a polypeptide linker of the disclosure is from about 20 to about 45 amino acids in length. In another embodiment, a polypeptide linker of the disclosure is from about 15 to about 25 amino acids in length. In another embodiment, a polypeptide linker of the disclosure is 1, 2, 3, 4, 5, 6, 7, 8, 9, 10, 11, 12, 13, 14, 15, 16, 17, 18, 19, 20, 21, 22, 23, 24, 25, 26, 27, 28, 29, 30, 31, 32, 33, 34, 35, 36, 37, 38, 39, 40, 41, 42, 43, 44, 45, 46, 47, 48, 49, 50, 51, 52, 53, 54, 55, 56, 57, 58, 59, 60, or 61 or more amino acids in length.

[0459] Polypeptide linkers can be introduced into polypeptide sequences using techniques known in the art. Modifications can be confirmed by DNA sequence analysis. Plasmid DNA can be used to transform host cells for stable production of the polypeptides produced.

### IV. Exemplary Immunomodulatory Fusion Proteins

[0460] The disclosure provides immunomodulatory fusion proteins comprising an immunomodulatory domain and a collagen-binding domain, optionally a linker, wherein the immunomodulatory domain is operably linked with or without the linker to the collagen-binding domain. The immunomodulatory fusion proteins of the disclosure are modular and can be configured to incorporate various individual domains.

### A. IL-2 Fusion Proteins

[0461] In some embodiments, the immunomodulatory fusion protein comprises IL-2 and lumican, wherein IL-2 is operably linked to lumican. In some embodiments, IL-2 is operably linked to lumican with albumin. In some embodiments, IL-2 is operably linked to the N-terminus of lumican. In some embodiments, IL-2 is operably linked to the C-terminus of lumican.

[0462] In some embodiments, the immunomodulatory fusion protein comprises the human IL-2 sequence set forth in SEQ ID NO: 1 operably linked to the human lumican sequence set forth in SEQ ID NO: 107. In some embodiments, the immunomodulatory fusion protein comprises the human IL-2 sequence set forth in SEQ ID NO: 1 operably linked to the human lumican sequence set forth in SEQ ID NO: 107 with a human serum albumin sequence selected from SEQ ID NO: 42 and SEQ ID NO: 43.

[0463] In some embodiments, the immunomodulatory fusion protein comprises IL-2 and LAIR-1, wherein IL-2 is operably linked to LAIR-1. In some embodiments, IL-2 is operably linked to LAIR-1 with albumin. In some embodiments, IL-2 is operably linked to the N-terminus of LAIR-1. In some embodiments, IL-2 is operably linked to the C-terminus of LAIR-1.

[0464] In some embodiments, the immunomodulatory fusion protein comprises the human IL-2 sequence set forth in SEQ ID NO: 1 operably linked to the human LAIR-1 sequence set forth in SEQ ID NO: 98. In some embodiments, the immunomodulatory fusion protein comprises the human IL-2 sequence set forth in SEQ ID NO: 1 operably linked to the human LAIR-1 sequence set forth in SEQ ID NO: 98 with a human serum albumin sequence selected from SEQ ID NO: 42 and SEQ ID NO: 43.

### B. IL-12 Fusion Proteins

[0465] In some embodiments, the immunomodulatory fusion protein comprises IL-12 and lumican, wherein IL-12 is operably linked to lumican. In some embodiments, IL-12 is operably linked to lumican with albumin. In some embodiments, IL-12 is operably linked to the N-terminus of lumican. In some embodiments, IL-12 is operably linked to the C-terminus of lumican.

[0466] In some embodiments, the immunomodulatory fusion protein comprises the human IL-12 sequences set forth in SEQ ID NO: 2 and SEQ ID NO: 3 operably linked to the human lumican sequence set forth in SEQ ID NO: 107. In some embodiments, the immunomodulatory fusion protein comprises the human IL-12 sequences set forth in SEQ ID NO: 2 and SEQ ID NO: 3 operably linked to the human lumican sequence set forth in SEQ ID NO: 107 with a human serum albumin sequence selected from SEQ ID NO: 42 and SEQ ID NO: 43.

[0467] In some embodiments, the immunomodulatory fusion protein comprises IL-12 and LAIR-1, wherein IL-12 is operably linked to LAIR-1. In some embodiments, IL-12 is operably linked to LAIR-1 with albumin. In some embodiments, IL-12 is operably linked to the N-terminus of LAIR-1. In some embodiments, IL-12 is operably linked to the C-terminus of LAIR-1.

[0468] In some embodiments, the immunomodulatory fusion protein comprises the human IL-12 sequences set forth in SEQ ID NO: 2 and SEQ ID NO: 3, operably linked to the human LAIR-1 sequence set forth in SEQ ID NO: 98. In some embodiments, the immunomodulatory fusion protein comprises the human IL-12 sequences set forth in SEQ ID NO: 2 and SEQ ID NO: 3 operably linked to the human LAIR-1 sequence set forth in SEQ ID NO: 98 with a human serum albumin sequence selected from SEQ ID NO: 42 and SEQ ID NO: 43.

### C. CCL-3 Fusion Proteins

[0469] In some embodiments, the immunomodulatory fusion protein comprises CCL-3 and lumican, wherein CCL-3 is operably linked to lumican. In some embodiments, CCL-3 is operably linked to lumican with albumin. In some embodiments, CCL-3 is operably linked to the N-terminus of lumican. In some embodiments, CCL-3 is operably linked to the C-terminus of lumican.

[0470] In some embodiments, the immunomodulatory fusion protein comprises the human CCL-3 sequence set forth in SEQ ID NO: 41 operably linked to the human lumican sequence set forth in SEQ ID NO: 107. In some embodiments, the immunomodulatory fusion protein comprises the human CCL-3 sequence set forth in SEQ ID NO: 41 operably linked to the human lumican sequence set forth in SEQ ID NO: 107 with a human serum albumin sequence selected from SEQ ID NO: 42 and SEQ ID NO: 43.

[0471] In some embodiments, the immunomodulatory fusion protein comprises CCL-3 and LAIR-1, wherein CCL-3 is operably linked to LAIR-1. In some embodiments, CCL-3 is operably linked to LAIR-1 with albumin. In some embodiments, CCL-3 is operably linked to the N-terminus of LAIR-1. In some embodiments, CCL-3 is operably linked to the C-terminus of LAIR-1.

[0472] In some embodiments, the immunomodulatory fusion protein comprises the human CCL-3 sequence set forth in SEQ ID NO: 41 operably linked to the human LAIR-1 sequence set forth in SEQ ID NO: 98. In some embodiments, the immunomodulatory fusion protein comprises the human CCL-3 sequence set forth in SEQ ID NO: 41 operably linked to the human LAIR-1 sequence set forth in SEQ ID NO: 98 with a human serum albumin sequence selected from SEQ ID NO: 42 and SEQ ID NO: 43.

### D. CCL-4 Fusion Proteins

[0473] In some embodiments, the immunomodulatory fusion protein comprises CCL-4 and lumican, wherein CCL-4 is operably linked to lumican. In some embodiments, CCL-4 is operably linked to lumican with albumin. In some embodiments, CCL-4 is operably linked to the N-terminus of lumican. In some embodiments, CCL-4 is operably linked to the C-terminus of lumican.

[0474] In some embodiments, the immunomodulatory fusion protein comprises the human CCL-4 sequence set forth in SEQ ID NO: 33 operably linked to the human lumican sequence set forth in SEQ ID NO: 107. In some embodiments, the immunomodulatory fusion protein comprises the human CCL-4 sequence set forth in SEQ ID NO: 33 operably linked to the human lumican sequence set forth in SEQ ID NO: 107 with a human serum albumin sequence selected from SEQ ID NO: 42 and SEQ ID NO: 43.

[0475] In some embodiments, the immunomodulatory fusion protein comprises CCL-4 and LAIR-1, wherein CCL-4 is operably linked to LAIR-1. In some embodiments, CCL-4 is operably linked to LAIR-1 with albumin. In some embodiments, CCL-4 is operably linked to the N-terminus of LAIR-1. In some embodiments, CCL-4 is operably linked to the C-terminus of LAIR-1.

[0476] In some embodiments, the immunomodulatory fusion protein comprises the human CCL-4 sequence set forth in SEQ ID NO: 33 operably linked to the human LAIR-1 sequence set forth in SEQ ID NO: 98. In some embodiments, the immunomodulatory fusion protein comprises the human CCL-4 sequence set forth in SEQ ID NO: 33 operably linked to the human LAIR-1 sequence set forth in SEQ ID NO: 98 with a human serum albumin sequence selected from SEQ ID NO: 42 and SEQ ID NO: 43.

### E. CCL-5 Fusion Proteins

[0477] In some embodiments, the immunomodulatory fusion protein comprises CCL-5 and lumican, wherein CCL-5 is operably linked to lumican. In some embodiments, CCL-5 is operably linked to lumican with albumin. In some embodiments, CCL-5 is operably linked to the N-terminus of lumican. In some embodiments, CCL-5 is operably linked to the C-terminus of lumican.

[0478] In some embodiments, the immunomodulatory fusion protein comprises the human CCL-5 sequence set forth in SEQ ID NO: 39 operably linked to the human lumican sequence set forth in SEQ ID NO: 107. In some embodiments, the immunomodulatory fusion protein comprises the human CCL-5 sequence set forth in SEQ ID NO: 39 operably linked to the human lumican sequence set forth in SEQ ID NO: 107 with a human serum albumin sequence selected from SEQ ID NO: 42 and SEQ ID NO: 43.

[0479] In some embodiments, the immunomodulatory fusion protein comprises CCL-5 and LAIR-1, wherein CCL-5 is operably linked to LAIR-1. In some embodiments, CCL-5 is operably linked to LAIR-1 with albumin. In some embodiments, CCL-5 is operably linked to the N-terminus of LAIR-1. In some embodiments, CCL-5 is operably linked to the C-terminus of LAIR-1.

[0480] In some embodiments, the immunomodulatory fusion protein comprises the human CCL-5 sequence set forth in SEQ ID NO: 39 operably linked to the human LAIR-1 sequence set forth in SEQ ID NO: 98. In some embodiments, the immunomodulatory fusion protein comprises the human CCL-5 sequence set forth in SEQ ID NO: 39 operably linked to the human LAIR-1 sequence set forth in SEQ ID NO: 98 with a human serum albumin sequence selected from SEQ ID NO: 42 and SEQ ID NO: 43.

### F. Eotaxin Fusion Proteins

[0481] In some embodiments, the immunomodulatory fusion protein comprises Eotaxin and lumican, wherein Eotaxin is operably linked to lumican. In some embodiments, Eotaxin is operably linked to lumican with albumin. In some embodiments, Eotaxin is operably linked to the N-terminus of lumican. In some embodiments, Eotaxin is operably linked to the C-terminus of lumican.

[0482] In some embodiments, the immunomodulatory fusion protein comprises the human Eotaxin sequence set forth in SEQ ID NO: 38 operably linked to the human lumican sequence set forth in SEQ ID NO: 107. In some embodiments, the immunomodulatory fusion protein comprises the human Eotaxin sequence set forth in SEQ ID NO: 38 operably linked to the human lumican sequence set forth in SEQ ID NO: 107 with a human serum albumin sequence selected from SEQ ID NO: 42 and SEQ ID NO: 43.

[0483] In some embodiments, the immunomodulatory fusion protein comprises Eotaxin and LAIR-1, wherein Eotaxin is operably linked to LAIR-1. In some embodiments, Eotaxin is operably linked to LAIR-1 with albumin. In some embodiments, Eotaxin is operably linked to the N-terminus of LAIR-1. In some embodiments, Eotaxin is operably linked to the C-terminus of LAIR-1.

[0484] In some embodiments, the immunomodulatory fusion protein comprises the human Eotaxin sequence set forth in SEQ ID NO: 38 operably linked to the human LAIR-1 sequence set forth in SEQ ID NO: 98. In some embodiments, the immunomodulatory fusion protein comprises the human Eotaxin sequence set forth in SEQ ID NO: 38 operably linked to the human LAIR-1 sequence set forth in SEQ ID NO: 98 with a human serum albumin sequence selected from SEQ ID NO: 42 and SEQ ID NO: 43.

### G. Antibody Fusion Proteins

[0485] In some embodiments, the immunomodulatory fusion protein comprises an anti-CD3 antibody and lumican, wherein the anti-CD3 antibody is operably linked to lumican. In some embodiments, the anti-CD3 antibody is operably linked to the N-terminus of lumican. In some embodiments, anti-CD3 antibody is operably linked to the C-terminus of lumican.

[0486] In some embodiments, the immunomodulatory fusion protein comprises an anti-CD3 antibody and LAIR-1, wherein the anti-CD3 antibody is operably linked to LAIR-1. In some embodiments, the anti-CD3 antibody is operably linked to the N-terminus of LAIR-1. In some embodiments, the anti-CD3 antibody is operably linked to the C-terminus of LAIR-1.

[0487] In some embodiments, the immunomodulatory fusion protein comprises an anti-4-1-BB antibody and lumican, wherein the anti-4-1-BB antibody is operably linked to lumican. In some embodiments, the anti-4-1-BB antibody is operably linked to the N-terminus of lumican. In some embodiments, anti-4-1-BB antibody is operably linked to the C-terminus of lumican.

[0488] In some embodiments, the immunomodulatory fusion protein comprises an anti-4-1-BB antibody and LAIR-1, wherein the anti-4-1-BB antibody is operably linked to LAIR-1. In some embodiments, the anti-4-1-BB antibody is operably linked to the N-terminus of LAIR-1. In some embodiments, the anti-4-1-BB antibody is operably linked to the C-terminus of LAIR-1.

[0489] In some embodiments, the immunomodulatory fusion protein comprises an anti-CD40 antibody and lumican, wherein the anti-CD40 antibody is operably linked to lumican. In some embodiments, the anti-CD40 antibody is operably linked to the N-terminus of lumican. In some embodiments, anti-CD40 antibody is operably linked to the C-terminus of lumican.

[0490] In some embodiments, the immunomodulatory fusion protein comprises an anti-CD40 antibody and LAIR-1, wherein the anti-CD40 antibody is operably linked to LAIR-1. In some embodiments, the anti-CD40 antibody is operably linked to the N-terminus of LAIR-1. In some embodiments, the anti-CD40 antibody is operably linked to the C-terminus of LAIR-1.

[0491] In some embodiments, the immunomodulatory fusion protein comprises an anti-OX40 antibody and lumican, wherein the anti-OX40 antibody is operably linked to lumican. In some embodiments, the anti-OX40 antibody is operably linked to the N-terminus of lumican. In some embodiments, anti-OX40 antibody is operably linked to the C-terminus of lumican.

[0492] In some embodiments, the immunomodulatory fusion protein comprises an anti-OX40 antibody and LAIR-1, wherein the anti-OX40 antibody is operably linked to LAIR-1. In some embodiments, the anti-OX40 antibody is operably linked to the N-terminus of LAIR-1. In some embodiments, the anti-OX40 antibody is operably linked to the C-terminus of LAIR-1.

### V. Methods for Making Immunomodulatory Fusion Proteins

[0493] In some aspects, the polypeptides described herein (e.g., collagen-binding domains, cytokines, antibodies) are made in transformed host cells using recombinant DNA techniques. To do so, a recombinant DNA molecule coding for the peptide is prepared. Methods of preparing such DNA molecules are well known in the art. For instance, sequences coding for the peptides could be excised from DNA using suitable restriction enzymes. Alternatively, the DNA molecule could be synthesized using chemical synthesis techniques, such as the phosphoramidate method. Also, a combination of these techniques could be used.

[0494] The methods of making polypeptides also include a vector capable of expressing the peptides in an appropriate host. The vector comprises the DNA molecule that codes for the peptides operatively linked to appropriate expression control sequences. Methods of affecting this operative linking, either before or after the DNA molecule is inserted into the vector, are well known. Expression control sequences include promoters, activators, enhancers, operators, ribosomal nuclease domains, start signals, stop signals, cap signals, polyadenylation signals, and other signals involved with the control of transcription or translation.

[0495] The resulting vector having the DNA molecule thereon is used to transform an appropriate host. This transformation may be performed using methods well known in the art.

[0496] Any of a large number of available and well-known host cells may be suitable for use in the methods disclosed herein. The selection of a particular host is dependent upon a number of factors recognized by the art. These include, for example, compatibility with the chosen expression vector, toxicity of the peptides encoded by the DNA molecule, rate of transformation, ease of recovery of the peptides, expression characteristics, bio-safety and costs. A balance of these factors must be struck with the understanding that not all hosts may be equally effective for the expression of a particular DNA sequence. Within these general guidelines, useful microbial hosts include bacteria (such as E. coli sp.), yeast (such as Saccharomyces sp.) and other fungi, insects, plants, mammalian (including human) cells in culture, or other hosts known in the art.

[0497] Next, the transformed host is cultured and purified. Host cells may be cultured under conventional fermentation conditions so that the desired compounds are expressed. Such fermentation conditions are well known in the art. Finally, the peptides are purified from culture by methods well known in the art.

[0498] The compounds may also be made by synthetic methods. For example, solid phase synthesis techniques may be used. Suitable techniques are well known in the art, and include those described in Merrifield (1973), Chem. Polypeptides, pp. 335-61 (Katsoyannis and Panayotis eds.); Merrifield (1963), J. Am. Chem. Soc. 85: 2149; Davis et al. (1985), Biochem. Intl. 10: 394-414; Stewart and Young (1969), Solid Phase Peptide Synthesis; U.S. Pat. No. 3,941,763; Finn et al. (1976), The Proteins (3rd ed.) 2: 105-253; and Erickson et al. (1976), The Proteins (3rd ed.) 2: 257-527. Solid phase synthesis is the preferred technique of making individual peptides since it is the most cost-effective method of making small peptides. Compounds that contain derivatized peptides or which contain non-peptide groups may be synthesized by well-known organic chemistry techniques.

[0499] Other methods are of molecule expression/synthesis are generally known in the art to one of ordinary skill.

[0500] The nucleic acid molecules described above can be contained within a vector that is capable of directing their expression in, for example, a cell that has been transduced with the vector. Accordingly, in addition to polypeptide mutants, expression vectors containing a nucleic acid molecule encoding a mutant and cells transfected with these vectors are among the certain embodiments.

[0501] Vectors suitable for use include T7-based vectors for use in bacteria (see, for example, Rosenberg et al., Gene 56: 125, 1987), the pMSXND expression vector for use in mammalian cells (Lee and Nathans, J. Biol. Chem. 263:3521, 1988), and baculovirus-derived vectors (for example the expression vector pBacPAKS from Clontech, Palo Alto, Calif.) for use in insect cells. The nucleic acid inserts, which encode the polypeptide of interest in such vectors, can be operably linked to a promoter, which is selected based on, for example, the cell type in which expression is sought. For example, a T7 promoter can be used in bacteria, a polyhedrin promoter can be used in insect cells, and a cytomegalovirus or metallothionein promoter can be used in mammalian cells. Also, in the case of higher eukaryotes, tissue-specific and cell type-specific promoters are widely available. These promoters are so named for their ability to direct expression of a nucleic acid molecule in a given tissue or cell type within the body. Skilled artisans are well aware of numerous promoters and other regulatory elements which can be used to direct expression of nucleic acids.

[0502] In addition to sequences that facilitate transcription of the inserted nucleic acid molecule, vectors can contain origins of replication, and other genes that encode a selectable marker. For example, the neomycin-resistance (neo^{r}) gene imparts G418 resistance to cells in which it is expressed, and thus permits phenotypic selection of the transfected cells. Those of skill in the art can readily determine whether a given regulatory element or selectable marker is suitable for use in a particular experimental context.

[0503] Viral vectors that are suitable for use include, for example, retroviral, adenoviral, and adeno-associated vectors, herpes virus, simian virus 40 (SV40), and bovine papilloma virus vectors (see, for example, Gluzman (Ed.), Eukaryotic Viral Vectors, CSH Laboratory Press, Cold Spring Harbor, N.Y.).

[0504] Prokaryotic or eukaryotic cells that contain and express a nucleic acid molecule that encodes a polypeptide mutant are also suitable for use. A cell is a transfected cell, i.e., a cell into which a nucleic acid molecule, for example a nucleic acid molecule encoding a mutant polypeptide, has been introduced by means of recombinant DNA techniques. The progeny of such a cell are also considered suitable for use in the methods disclosed herein.

[0505] The precise components of the expression system are not critical. For example, a polypeptide mutant can be produced in a prokaryotic host, such as the bacterium E. coli, or in a eukaryotic host, such as an insect cell (e.g., an Sf21 cell), or mammalian cells (e.g., COS cells, NIH 3T3 cells, or HeLa cells). These cells are available from many sources, including the American Type Culture Collection (Manassas, Va.). In selecting an expression system, it matters only that the components are compatible with one another. Artisans or ordinary skill are able to make such a determination. Furthermore, if guidance is required in selecting an expression system, skilled artisans may consult Ausubel et al. (Current Protocols in Molecular Biology, John Wiley and Sons, New York, N.Y., 1993) and Pouwels et al. (Cloning Vectors: A Laboratory Manual, 1985 Suppl. 1987).

[0506] The expressed polypeptides can be purified from the expression system using routine biochemical procedures, and can be used, e.g., as therapeutic agents, as described herein.

### Pharmaceutical Compositions and Modes of Administration

[0507] In certain embodiments, the disclosure provides for a pharmaceutical composition comprising an immunomodulatory fusion protein with a pharmaceutically acceptable diluent, carrier, solubilizer, emulsifier, preservative and/or adjuvant.

[0508] In certain embodiments, acceptable formulation materials preferably are nontoxic to recipients at the dosages and concentrations employed. In certain embodiments, the formulation material(s) are for s.c. and/or I.V. administration. In certain embodiments, the formulation material(s) are for local administration, e.g., intratumoral administration. In certain embodiments, the pharmaceutical composition can contain formulation materials for modifying, maintaining or preserving, for example, the pH, osmolality, viscosity, clarity, color, isotonicity, odor, sterility, stability, rate of dissolution or release, adsorption or penetration of the composition. In certain embodiments, suitable formulation materials include, but are not limited to, amino acids (such as glycine, glutamine, asparagine, arginine or lysine); antimicrobials; antioxidants (such as ascorbic acid, sodium sulfite or sodium hydrogen-sulfite); buffers (such as borate, bicarbonate, Tris-HCl, citrates, phosphates or other organic acids); bulking agents (such as mannitol or glycine); chelating agents (such as ethylenediamine tetraacetic acid (EDTA)); complexing agents (such as caffeine, polyvinylpyrrolidone, beta-cyclodextrin or hydroxypropyl-beta-cyclodextrin); fillers; monosaccharides; disaccharides; and other carbohydrates (such as glucose, mannose or dextrins); proteins (such as serum albumin, gelatin or immunoglobulins); coloring, flavoring and diluting agents; emulsifying agents; hydrophilic polymers (such as polyvinylpyrrolidone); low molecular weight polypeptides; salt-forming counterions (such as sodium); preservatives (such as benzalkonium chloride, benzoic acid, salicylic acid, thimerosal, phenethyl alcohol, methylparaben, propylparaben, chlorhexidine, sorbic acid or hydrogen peroxide); solvents (such as glycerin, propylene glycol or polyethylene glycol); sugar alcohols (such as mannitol or sorbitol); suspending agents; surfactants or wetting agents (such as pluronics, PEG, sorbitan esters, polysorbates such as polysorbate 20, polysorbate 80, triton, tromethamine, lecithin, cholesterol, tyloxapal); stability enhancing agents (such as sucrose or sorbitol); tonicity enhancing agents (such as alkali metal halides, preferably sodium or potassium chloride, mannitol sorbitol); delivery vehicles; diluents; excipients and/or pharmaceutical adjuvants. (Remington's Pharmaceutical Sciences, 18th Edition, A. R. Gennaro, ed., Mack Publishing Company (1995). In certain embodiments, the formulation comprises PBS; 20 mM NaOAC, pH 5.2, 50 mM NaCl; and/or 10 mM NAOAC, pH 5.2, 9% Sucrose. In certain embodiments, the optimal pharmaceutical composition will be determined by one skilled in the art depending upon, for example, the intended route of administration, delivery format and desired dosage. See, for example, Remington's Pharmaceutical Sciences, supra. In certain embodiments, such compositions may influence the physical state, stability, rate of in vivo release and rate of in vivo clearance of the immunomodulatory fusion protein.

[0509] In some embodiments, the formulations comprising an immunomodulatory fusion protein described herein are 4° C. to 37° C. when administered to a subject.

[0510] In certain embodiments, the primary vehicle or carrier in a pharmaceutical composition can be either aqueous or non-aqueous in nature. For example, in certain embodiments, a suitable vehicle or carrier can be water for injection, physiological saline solution or artificial cerebrospinal fluid, possibly supplemented with other materials common in compositions for parenteral administration. In certain embodiments, the saline comprises isotonic phosphate-buffered saline. In certain embodiments, neutral buffered saline or saline mixed with serum albumin are further exemplary vehicles. In certain embodiments, pharmaceutical compositions comprise Tris buffer of about pH 7.0-8.5, or acetate buffer of about pH 4.0-5.5, which can further include sorbitol or a suitable substitute therefore. In certain embodiments, a composition comprising an immunomodulatory fusion protein is prepared for storage by mixing the selected composition having the desired degree of purity with optional formulation agents (Remington's Pharmaceutical Sciences, supra) in the form of a lyophilized cake or an aqueous solution. Further, in certain embodiments, a composition comprising an immunomodulatory fusion protein is formulated as a lyophilizate using appropriate excipients such as sucrose.

[0511] In certain embodiments, the pharmaceutical composition is selected for parenteral delivery. In certain embodiments, the compositions are selected for inhalation or for delivery through the digestive tract, such as orally. The preparation of such pharmaceutically acceptable compositions is within the ability of one skilled in the art.

[0512] In certain embodiments, the formulation components are present in concentrations that are acceptable to the site of administration. In certain embodiments, buffers are used to maintain the composition at physiological pH or at a slightly lower pH, typically within a pH range of from about 5 to about 8.

[0513] In certain embodiments, when parenteral administration is contemplated, a therapeutic composition is in the form of a pyrogen-free, parenterally acceptable aqueous solution comprising an immunomodulatory fusion protein, in a pharmaceutically acceptable vehicle. In certain embodiments, a vehicle for parenteral injection is sterile distilled water in which the immunomodulatory fusion protein is formulated as a sterile, isotonic solution, properly preserved. In certain embodiments, the preparation can involve the formulation of the desired molecule with an agent, such as injectable microspheres, bio-erodible particles, polymeric compounds (such as polylactic acid or polyglycolic acid), beads or liposomes, that can provide for the controlled or sustained release of the product which can then be delivered via a depot injection. In certain embodiments, hyaluronic acid can also be used, and can have the effect of promoting sustained duration in the circulation. In certain embodiments, implantable drug delivery devices can be used to introduce the desired molecule.

[0514] In certain embodiments, a pharmaceutical composition is formulated for inhalation. In certain embodiments, an immunomodulatory fusion protein is formulated as a dry powder for inhalation. In certain embodiments, an inhalation solution comprising an immunomodulatory fusion protein is formulated with a propellant for aerosol delivery. In certain embodiments, solutions can be nebulized. Pulmonary administration is further described in PCT application No. PCT/US94/001875, which describes pulmonary delivery of chemically modified proteins.

[0515] In certain embodiments, it is contemplated that formulations are administered orally. In certain embodiments, an immunomodulatory fusion protein administered in this fashion is formulated with or without those carriers customarily used in the compounding of solid dosage forms such as tablets and capsules. In certain embodiments, a capsule is designed to release the active portion of the formulation at the point in the gastrointestinal tract when bioavailability is maximized and pre-systemic degradation is minimized. In certain embodiments, at least one additional agent is included to facilitate absorption of the immunomodulatory fusion protein. In certain embodiments, diluents, flavorings, low melting point waxes, vegetable oils, lubricants, suspending agents, tablet disintegrating agents, and binders can also be employed.

[0516] In certain embodiments, a pharmaceutical composition comprises an effective quantity of immunomodulatory fusion protein in a mixture with non-toxic excipients which are suitable for the manufacture of tablets. In certain embodiments, by dissolving the tablets in sterile water, or another appropriate vehicle, solutions are prepared in unit-dose form. In certain embodiments, suitable excipients include, but are not limited to, inert diluents, such as calcium carbonate, sodium carbonate or bicarbonate, lactose, or calcium phosphate; or binding agents, such as starch, gelatin, or acacia; or lubricating agents such as magnesium stearate, stearic acid, or talc.

[0517] Additional pharmaceutical compositions will be evident to those skilled in the art, including formulations involving an immunomodulatory fusion protein, in sustained- or controlled-delivery formulations. In certain embodiments, techniques for formulating a variety of other sustained- or controlled-delivery means, such as liposome carriers, bio-erodible microparticles or porous beads and depot injections, are also known to those skilled in the art. See for example, PCT Application No. PCT/US93/00829 which describes the controlled release of porous polymeric microparticles for the delivery of pharmaceutical compositions. In certain embodiments, sustained-release preparations can include semipermeable polymer matrices in the form of shaped articles, e.g. films, or microcapsules. Sustained release matrices can include polyesters, hydrogels, polylactides (U.S. Pat. No. 3,773,919 and EP 058,481), copolymers of L-glutamic acid and gamma ethyl-L-glutamate (Sidman et al., Biopolymers, 22:547-556 (1983)), poly (2-hydroxyethyl-methacrylate) (Langer et al., J. Biomed. Mater. Res., 15: 167-277 (1981) and Langer, Chem. Tech., 12:98-105 (1982)), ethylene vinyl acetate (Langer et al., supra) or poly-D(−)-3-hydroxybutyric acid (EP 133,988). In certain embodiments, sustained release compositions include liposomes, which can be prepared by any of several methods known in the art. See, e.g., Eppstein et al, Proc. Natl. Acad. Sci. USA, 82:3688-3692 (1985); EP 036,676; EP 088,046 and EP 143,949.

[0518] The pharmaceutical composition to be used for in vivo administration typically is sterile. In certain embodiments, this is accomplished by filtration through sterile filtration membranes. In certain embodiments, where the composition is lyophilized, sterilization using this method is conducted either prior to or following lyophilization and reconstitution. In certain embodiments, the composition for parenteral administration can be stored in lyophilized form or in a solution. In certain embodiments, parenteral compositions generally are placed into a container having a sterile access port, for example, an intravenous solution bag or vial having a stopper pierceable by a hypodermic injection needle.

[0519] In certain embodiments, once the pharmaceutical composition has been formulated, it can be stored in sterile vials as a solution, suspension, gel, emulsion, solid, or as a dehydrated or lyophilized powder. In certain embodiments, such formulations can be stored either in a ready-to-use form or in a form (e.g., lyophilized) that is reconstituted prior to administration.

[0520] In certain embodiments, kits are provided for producing a single-dose administration unit. In certain embodiments, the kit can contain both a first container having a dried protein and a second container having an aqueous formulation. In certain embodiments, kits containing single and multi-chambered pre-filled syringes (e.g., liquid syringes and lyosyringes) are included.

[0521] In certain embodiments, the effective amount of a pharmaceutical composition comprising immunomodulatory fusion protein to be employed therapeutically will depend, for example, upon the therapeutic context and objectives. One skilled in the art will appreciate that the appropriate dosage levels for treatment, according to certain embodiments, will thus vary depending, in part, upon the molecule delivered, the indication for which the immunomodulatory fusion protein is being used, the route of administration, and the size (body weight, body surface or organ size) and/or condition (the age and general health) of the patient. In certain embodiments, the clinician can titer the dosage and modify the route of administration to obtain the optimal therapeutic effect.

[0522] In certain embodiments, the frequency of dosing will take into account the pharmacokinetic parameters of the immunomodulatory fusion protein in the formulation used. In certain embodiments, a clinician will administer the composition until a dosage is reached that achieves the desired effect. In certain embodiments, the composition can therefore be administered as a single dose, or as two or more doses (which may or may not contain the same amount of the desired molecule) over time, or as a continuous infusion via an implantation device or catheter. Further refinement of the appropriate dosage is routinely made by those of ordinary skill in the art and is within the ambit of tasks routinely performed by them. In certain embodiments, appropriate dosages can be ascertained through use of appropriate dose-response data.

[0523] In certain embodiments, the route of administration of the pharmaceutical composition is in accord with known methods, e.g. orally, through injection by intravenous, intraperitoneal, intracerebral (intra-parenchymal), intracerebroventricular, intramuscular, subcutaneously, intraocular, intraarterial, intraportal, or intralesional routes; by sustained release systems or by implantation devices. In certain embodiments, the compositions can be administered by bolus injection or continuously by infusion, or by implantation device. In certain embodiments, individual elements of the combination therapy may be administered by different routes.

[0524] In certain embodiments, the composition can be administered locally via implantation of a membrane, sponge or another appropriate material onto which the desired molecule has been absorbed or encapsulated. In certain embodiments, where an implantation device is used, the device can be implanted into any suitable tissue or organ, and delivery of the desired molecule can be via diffusion, timed-release bolus, or continuous administration. In certain embodiments, it can be desirable to use a pharmaceutical composition comprising an immunomodulatory fusion protein in an ex vivo manner. In such instances, cells, tissues and/or organs that have been removed from the patient are exposed to a pharmaceutical composition comprising the immunomodulatory fusion protein after which the cells, tissues and/or organs are subsequently implanted back into the patient.

[0525] In certain embodiments, an immunomodulatory fusion protein is delivered by implanting certain cells that have been genetically engineered, using methods such as those described herein, to express and secrete the polypeptides. In certain embodiments, such cells can be animal or human cells, and can be autologous, heterologous, or xenogeneic. In certain embodiments, the cells can be immortalized. In certain embodiments, in order to decrease the chance of an immunological response, the cells can be encapsulated to avoid infiltration of surrounding tissues. In certain embodiments, the encapsulation materials are typically biocompatible, semipermeable polymeric enclosures or membranes that allow the release of the protein product(s) but prevent the destruction of the cells by the patient's immune system or by other detrimental factors from the surrounding tissues.

### Methods of Treating

[0526] The immunomodulatory fusion proteins and/or nucleic acids expressing them, described herein, are useful for treating a disorder associated with abnormal apoptosis or a differentiative process (e.g., cellular proliferative disorders (e.g., hyperproliferaetive disorders) or cellular differentiative disorders, such as cancer). Non-limiting examples of cancers that are amenable to treatment with the methods of the present disclosure are described below.

[0527] Examples of cellular proliferative and/or differentiative disorders include cancer (e.g., carcinoma, sarcoma, metastatic disorders or hematopoietic neoplastic disorders, e.g., leukemias). A metastatic tumor can arise from a multitude of primary tumor types, including but not limited to those of prostate, colon, lung, breast and liver. Accordingly, the compositions used herein, comprising, e.g., immunomodulatory fusion protein, can be administered to a patient who has cancer.

[0528] As used herein, the terms “cancer” (or “cancerous”), “hyperproliferative,” and “neoplastic” refer to cells having the capacity for autonomous growth (i.e., an abnormal state or condition characterized by rapidly proliferating cell growth). Hyperproliferative and neoplastic disease states may be categorized as pathologic (i.e., characterizing or constituting a disease state), or they may be categorized as non-pathologic (i.e., as a deviation from normal but not associated with a disease state). The terms are meant to include all types of cancerous growths or oncogenic processes, metastatic tissues or malignantly transformed cells, tissues, or organs, irrespective of histopathologic type or stage of invasiveness. “Pathologic hyperproliferative” cells occur in disease states characterized by malignant tumor growth. Examples of non-pathologic hyperproliferative cells include proliferation of cells associated with wound repair.

[0529] The terms “cancer” or “neoplasm” are used to refer to malignancies of the various organ systems, including those affecting the lung, breast, thyroid, lymph glands and lymphoid tissue, gastrointestinal organs, and the genitourinary tract, as well as to adenocarcinomas which are generally considered to include malignancies such as most colon cancers, renal-cell carcinoma, prostate cancer and/or testicular tumors, non-small cell carcinoma of the lung, cancer of the small intestine and cancer of the esophagus.

[0530] The term “carcinoma” is art recognized and refers to malignancies of epithelial or endocrine tissues including respiratory system carcinomas, gastrointestinal system carcinomas, genitourinary system carcinomas, testicular carcinomas, breast carcinomas, prostatic carcinomas, endocrine system carcinomas, and melanomas. The immunomodulatory fusion proteins can be used to treat patients who have, who are suspected of having, or who may be at high risk for developing any type of cancer, including renal carcinoma or melanoma, or any viral disease. Exemplary carcinomas include those forming from tissue of the cervix, lung, prostate, breast, head and neck, colon and ovary. The term also includes carcinosarcomas, which include malignant tumors composed of carcinomatous and sarcomatous tissues. An “adenocarcinoma” refers to a carcinoma derived from glandular tissue or in which the tumor cells form recognizable glandular structures.

[0531] Additional examples of proliferative disorders include hematopoietic neoplastic disorders. As used herein, the term “hematopoietic neoplastic disorders” includes diseases involving hyperplastic/neoplastic cells of hematopoietic origin, e.g., arising from myeloid, lymphoid or erythroid lineages, or precursor cells thereof. Preferably, the diseases arise from poorly differentiated acute leukemias (e.g., erythroblastic leukemia and acute megakaryoblastic leukemia). Additional exemplary myeloid disorders include, but are not limited to, acute promyeloid leukemia (APML), acute myelogenous leukemia (AML) and chronic myelogenous leukemia (CML) (reviewed in Vaickus, L. (1991) Crit. Rev. in Oncol./Hemotol. 11:267-97); lymphoid malignancies include, but are not limited to acute lymphoblastic leukemia (ALL) which includes B-lineage ALL and T-lineage ALL, chronic lymphocytic leukemia (CLL), prolymphocytic leukemia (PLL), hairy cell leukemia (HLL) and Waldenstrom's macro globulinemia (WM). Additional forms of malignant lymphomas include, but are not limited to non-Hodgkin lymphoma and variants thereof, peripheral T cell lymphomas, adult T cell leukemia/lymphoma (ATL), cutaneous T cell lymphoma (CTCL), large granular lymphocytic leukemia (LGF), Hodgkin's disease and Reed-Sternberg disease.

[0532] It will be appreciated by those skilled in the art that amounts of an immunomodulatory fusion protein sufficient to reduce tumor growth and size, or a therapeutically effective amount, will vary not only on the particular compounds or compositions selected, but also with the route of administration, the nature of the condition being treated, and the age and condition of the patient, and will ultimately be at the discretion of the patient's physician or pharmacist. The length of time during which the compounds used in the instant method will be given varies on an individual basis.

[0533] It will be appreciated by those skilled in the art that the B16 melanoma model used herein is a generalized model for solid tumors. That is, efficacy of treatments in this model is also predictive of efficacy of the treatments in other non-melanoma solid tumors. For example, as described in Baird et al. (J Immunology 2013; 190:469-78; Epub Dec. 7, 2012), efficacy of cps, a parasite strain that induces an adaptive immune response, in mediating anti-tumor immunity against B16F10 tumors was found to be generalizable to other solid tumors, including models of lung carcinoma and ovarian cancer. In another example, results from a line of research into VEGF targeting lymphocytes also shows that results in B16F10 tumors were generalizable to the other tumor types studied (Chinnasamy et al., JCI 2010; 120:3953-68; Chinnasamy et al., Clin Cancer Res 2012; 18:1672-83). In yet another example, immunotherapy involving LAG-3 and PD-1 led to reduced tumor burden, with generalizable results in a fibrosarcoma and colon adenocarcinoma cell lines (Woo et al., Cancer Res 2012; 72:917-27).

[0534] In certain embodiments, the immunomodulatory fusion proteins disclosed herein are used to treat cancer. In certain embodiments, the immunomodulatory fusion proteins disclosed herein are used to treat melanoma, leukemia, lung cancer, breast cancer, prostate cancer, ovarian cancer, colon cancer, and brain cancer.

[0535] In certain embodiments, the immunomodulatory fusion proteins disclosed herein inhibit the growth and/or proliferation of tumor cells. In certain embodiments, the immunomodulatory fusion proteins disclosed herein reduce tumor size. In certain embodiments, the immunomodulatory fusion proteins disclosed herein inhibit metastases of a primary tumor.

[0536] It will be appreciated by those skilled in the art that reference herein to treatment extends to prophylaxis as well as the treatment of the noted cancers and symptoms.

### Combination Therapy

[0537] In some embodiments, the immunomodulatory fusion proteins are used in combination with other therapies. For example, in some embodiments the immunomodulatory fusion proteins are used in combination with another immunotherapy. Exemplary immunotherapies include, but are not limited to, chimeric antigen receptor (CAR) T cell therapy, tumor-associated antigen targeting antibodies, immune checkpoint inhibitors, and cancer vaccines.

### I. Chimeric Antigen Receptor (CAR) Effector Cells

[0538] In some aspects, the disclosure provides immunomodulatory fusion proteins to be used or performed in conjunction with chimeric antigen receptor (CAR) effector cell therapy (e.g., CAR T cells).

[0539] Chimeric antigen receptors (CARs) are genetically-engineered, artificial transmembrane receptors, which confer an arbitrary specificity for a ligand onto an immune effector cell (e.g. a T cell, natural killer cell or other immune cell) and which results in activation of the effector cell upon recognition and binding to the ligand. Typically these receptors are used to impart the antigen specificity of a monoclonal antibody onto a T cell.

[0540] In some embodiments, CARs contain three domains: 1) an ectodomain typically comprising a signal peptide, a ligand or antigen recognition region (e.g. scFv), and a flexible spacer; 2) a transmembrane (TM) domain; 3) an endodomain (alternatively known as an “activation domain”) typically comprising one or more intracellular signaling domains. The ectodomain of the CAR resides outside of the cell and is exposed to the extracellular space, whereby it is accessible for interaction with its cognate ligand. The TM domain allows the CAR to be anchored into the cell membrane of the effector cell. The third endodomain (also known as the “activation domain”) aids in effector cell activation upon binding of the CAR to its specific ligand. In some embodiments, effector cell activation comprises induction of cytokine and chemokine production, as well as activation of the cytolytic activity of the cells. In some embodiments, the CARs redirect cytotoxicity toward tumor cells.

[0541] In some embodiments, CARs comprise a ligand- or antigen-specific recognition domain that binds to a specific target ligand or antigen (also referred to as a binding domain). In some embodiments, the binding domain is a single-chain antibody variable fragment (scFv), a tethered ligand or the extracellular domain of a co-receptor, fused to a transmembrane domain, which is linked, in turn, to a signaling domain. In some embodiments, the signaling domain is derived from CD3 ζ or FcRγ. In some embodiments, the CAR comprises one or more co-stimulatory domains derived from a protein such as CD28, CD137 (also known as 4-1BB), CD134 (also known as OX40) and CD278 (also known as ICOS).

[0542] Engagement of the antigen binding domain of the CAR with its target antigen on the surface of a target cell results in clustering of the CAR and delivers an activation stimulus to the CAR-containing cell. In some embodiments, the main characteristic of CARs are their ability to redirect immune effector cell specificity, thereby triggering proliferation, cytokine production, phagocytosis or production of molecules that can mediate cell death of the target antigen expressing cell in a major histocompatibility (MHC) independent manner, exploiting the cell specific targeting abilities of monoclonal antibodies, soluble ligands or cell specific co-receptors. Although scFv-based CARs engineered to contain a signaling domain from CD3 ζ or FcRγ have been shown to deliver a potent signal for T cell activation and effector function, they are not sufficient to elicit signals that promote T cell survival and expansion in the absence of a concomitant co-stimulatory signal. A new generation of CARs containing a binding domain, a hinge, a transmembrane and the signaling domain derived from CD3 ζ or FcRγ together with one or more co-stimulatory signaling domains (e.g., intracellular co-stimulatory domains derived from CD28, CD137, CD134 and CD278) has been shown to more effectively direct antitumor activity as well as increased cytokine secretion, lytic activity, survival and proliferation in CAR expressing T cells in vitro, in animal models and cancer patients (Milone et al., Molecular Therapy, 2009; 17: 1453-1464; Zhong et al., Molecular Therapy, 2010; 18: 413-420; Carpenito et al., PNAS, 2009; 106:3360-3365).

[0543] In some embodiments, chimeric antigen receptor-expressing effector cells (e.g. CAR-T cells) are cells that are derived from a patient with a disease or condition and genetically modified in vitro to express at least one CAR with an arbitrary specificity to a ligand. The cells perform at least one effector function (e.g. induction of cytokines) that is stimulated or induced by the specific binding of the ligand to the CAR and that is useful for treatment of the same patient's disease or condition. The effector cells may be T cells (e.g. cytotoxic T cells or helper T cells). One skilled in the art would understand that other cell types (e.g. a natural killer cell or a stem cell) may express CARs and that a chimeric antigen receptor effector cell may comprise an effector cell other than a T cell. In some embodiments, the effector cell is a T cell (e.g. a cytotoxic T cell) that exerts its effector function (e.g. a cytotoxic T cell response) on a target cell when brought in contact or in proximity to the target or target cell (e.g. a cancer cell) (see e.g., Chang and Chen (2017) Trends Mol Med 23(5):430-450).

[0544] Prolonged exposure of T cells to their cognate antigen can result in exhaustion of effector functions, enabling the persistence of infected or transformed cells. Recently developed strategies to stimulate or rejuvenate host effector function using agents that induce an immune checkpoint blockade have resulted in success towards the treatment of several cancers. Emerging evidence suggests that T cell exhaustion may also represent a significant impediment in sustaining long-lived antitumor activity by chimeric antigen receptor-expressing T cells (CAR-T cells. In some embodiments, the differentiation status of the patient-harvested T cells prior to CAR transduction and the conditioning regimen a patient undergoes before reintroducing the CAR-T cells (e.g., addition or exclusion of alkylating agents, fludarabine, total-body irradiation) can profoundly affect the persistence and cytotoxic potential of CAR-T cells. In vitro culture conditions that stimulate (via anti-CD3/CD28 or stimulator cells) and expand (via cytokines, such as IL-2) T cell populations can also alter the differentiation status and effector function of CAR-T cells (Ghoneim et al., (2016) Trends in Molecular Medicine 22(12):1000-1011).

[0545] In some embodiments, in particular for the treatment of ALL and/or NHL, suitable CARs target CD19 or CD20. Non-limiting examples include CARs comprising a structure: (i) an anti-CD19 scFv, a CD8 H/TM domain, an 4-1BB CS domain and a CD3ζ TCR signaling domain; (ii) an anti-CD19 scFv, a CD28 hinge and transmembrane domain, a CD28 co-stimulatory domain and a CD3ζ TCR signaling domain; and (iii) an anti-CD20 scFv, an IgG hinge and transmembrane domain, a CD28/4-1BB co-stimulatory domain and a CD3ζ TCR signaling domain. In some embodiments, a CAR effector cell suitable for combination with the combinations and methods disclosed herein targets CD19 or CD20, including but not limited to Kymriah™ (tisagenlecleucel; Novartis; formerly CTL019) and Yescarta™ (axicabtagene ciloleucel; Kite Pharma).

### A. Re-Targeted CAR T Cells

[0546] In some embodiments, the CAR-T therapy suitable for use in combination with the immunomodulatory fusion proteins is a re-targeted CAR-T cell. In some embodiments, effector cells (e.g., T cells) modified to express a CAR which binds to a universal immune receptor, a tag, a switch or an Fc region on an immunoglobulin are suitable for the methods described herein.

[0547] In some embodiments, effector cells (e.g., T cells) are modified to express a universal immune receptor or UnivIR. One type of UnivIR is a biotin-binding immune receptor (BBIR) (see e.g., US Patent Publication US20140234348 A1 incorporated herein by reference in its entirety). Other examples of methods and compositions relating to universal chimeric receptors and/or effector cells expressing universal chimeric receptors are described in International Patent Applications WO2016123122A1, WO2017143094A1, WO2013074916A1, US Patent Application US20160348073A1, all of which are incorporated herein by reference in their entirety.

[0548] In some embodiments, effector cells (e.g., T cells) are modified to express a universal, modular, anti-tag chimeric antigen receptor (UniCAR). This system allows for retargeting of UniCAR engrafted immune cells against multiple antigens (see e.g., US Patent Publication US20170240612 A1 incorporated herein by reference in its entirety; Cartellieri et al., (2016) Blood Cancer Journal 6, e458 incorporated herein by reference in its entirety).

[0549] In some embodiments, effector cells (e.g., T cells) are modified to express a switchable chimeric antigen receptor and chimeric antigen receptor effector cell (CAR-EC) switches. In this system, the CAR-EC switches have a first region that is bound by a chimeric antigen receptor on the CAR-EC and a second region that binds a cell surface molecule on target cell, thereby stimulating an immune response from the CAR-EC that is cytotoxic to the bound target cell. In some embodiments, the CAR-EC is a T cell, wherein the CAR-EC switch may act as an “on-switch” for CAR-EC activity. Activity may be “turned off” by reducing or ceasing administration of the switch. These CAR-EC switches may be used with CAR-ECs disclosed herein, as well as existing CAR T-cells, for the treatment of a disease or condition, such as cancer, wherein the target cell is a malignant cell. Such treatment may be referred to herein as switchable immunotherapy (US Patent Publication U.S. Pat. No. 9,624,276 B2 incorporated herein by reference in its entirety). In some embodiments, effector cells (e.g., T cells) are modified to express a receptor that binds the Fc portion of human immunoglobulins (e.g., CD16V-BB-ζ) (Kudo et al., (2014) Cancer Res 74(1):93-103 incorporated herein by reference in its entirety).

[0550] In some embodiments, effector cells (e.g., T cells) are modified to express a universal immune receptor (e.g., switchable CAR, sCAR) that binds a peptide neo-epitope (PNE). In some embodiments, the peptide neo-epitope (PNE), has been incorporated at defined different locations within an antibody targeting an antigen (antibody switch). Therefore, sCAR-T-cell specificity is redirected only against PNE, not occurring in the human proteome, thus allowing an orthogonal interaction between the sCAR-T-cell and the antibody switch. In this way, sCAR-T cells are strictly dependent on the presence of the antibody switch to become fully activated, thus excluding CAR T-cell off-target recognition of endogenous tissues or antigens in the absence of the antibody switch (Arcangeli et al., (2016) Transl Cancer Res 5 (Suppl 2):S174-S177 incorporated herein by reference in its entirety). Other examples of switchable CARs is provided by US Patent Application US20160272718A1 incorporated herein by reference in its entirety.

[0551] As used herein, the term “tag” encompasses a universal immune receptor, a tag, a switch, or an Fc region of an immunoglobulin as described supra. In some embodiments, an effector cell is modified to express a CAR comprising a tag binding domain. In some embodiments, the CAR binds fluorescein isothiocyanate (FITC), streptavidin, biotin, dinitrophenol, peridinin chlorophyll protein complex, green fluorescent protein, phycoerythrin (PE), horse radish peroxidase, palmitoylation, nitrosylation, alkalanine phosphatase, glucose oxidase, or maltose binding protein.

### B. Anti-TAG Chimeric Antigen Receptors (AT-CAR)

[0552] In some embodiments, the CAR-T therapy suitable for use in combination with the immunomodulatory fusion proteins is an anti-tag CAR T cell. There are several limitations to the generalized clinical application of CAR T cells. For example, as there is no single tumor antigen universally expressed by all cancer types, each scFv in a CAR needs to be engineered with specificity for the desired tumor antigen. In addition, tumor antigens targeted by a CAR may be down-regulated or mutated in response to treatment resulting in tumor evasion.

[0553] As an alternative, universal, anti-tag chimeric antigen receptors (AT-CAR) and CAR-T cells have been developed. For example, human T cells have been engineered to express an anti-fluorescein isothiocyanate (FITC) CAR (referred to anti-FITC-CAR). This platform takes advantage of the high affinity interaction between the anti-FITC scFv (on the cell's surface) and FITC as well as the ability conjugate FITC molecules (or other tags) to any anti-cancer-based monoclonal antibody such as cetuximab (anti-EGFR), retuximab (anti-CD20) and herceptin (anti-Her2).

[0554] Accordingly, in some embodiments, effector cells (e.g., T cells) are modified to express a universal anti-tag chimeric antigen receptor (AT-CAR), as described at least in WO 2012082841 and US20160129109A1, incorporated herein by reference in its entirety. In such AT-CAR systems, T cells recognize and bind tagged proteins, such as antibodies. For example, in some embodiments an AT-CAR T cell recognizes tag-labeled antibodies, such as FITC-labeled antibodies. In some embodiments, an anti-tumor antigen antibody is conjugated to a tag (e.g., FITC), and administered prior to, concurrently, or after AT-CAR therapy. Anti-tumor antigen antibodies are known to those of skill in the art.

[0555] As indicated, the binding specificity of the tag-binding domain depends on the identity of the tag that is conjugated to the protein that is used to bind target cells. For example, in some aspects of the disclosure, the tag is FITC, the tag-binding domain is an anti-FITC scFv. Alternatively, in some aspects of the disclosure, the tag is biotin or PE (phycoerythrin) and the tag-binding domain is an anti-biotin scFv or an anti-PE scFv.

[0556] In some embodiments, the protein of each formulation of tagged proteins is the same or different and the protein is an antibody or an antigen-binding fragment thereof. In some aspects, the antibody or antigen-binding fragment thereof is cetuximab (anti-EGFR), nimotuzumab (anti-EGFR), panitumumab (anti-EGFR), retuximab (anti-CD20), omalizumab (anti-CD20), tositumomab (anti-CD20), trastuzumab (anti-Her2), gemtuzumab (anti-CD33), alemtuzumab (anti-CD52), and bevacuzimab (anti-VEGF).

[0557] Thus, in some embodiments, the tagged proteins include FITC-conjugated antibodies, biotin-conjugated antibodies, PE-conjugated antibodies, histidine-conjugated antibodies and streptavidin-conjugated antibodies, where the antibody binds to a TAA or a TSA expressed by the target cells. For example, the tagged proteins include, but are not limited to, FITC-conjugated cetuximab, FITC-conjugated retuximab, FITC-conjugated herceptin, biotin-conjugated cetuximab, biotin-conjugated retuximab, biotin-conjugated herceptin, PE-conjugated cetuximab, PE-conjugated retuximab, PE-conjugated herceptin, histidine-conjugated cetuximab, histidine-conjugated retuximab, histidine-conjugated herceptin, streptavidin-conjugated cetuximab, streptavidin-conjugated retuximab, and streptavidin-conjugated herceptin.

[0558] In some embodiments, the AT-CAR of each population of AT-CAR-expressing T cells is the same or different and the AT-CAR comprises a tag-binding domain, a transmembrane domain, and an activation domain. In some embodiments, the tag-binding domain is an antibody or an antigen-binding fragment thereof. In some aspects, the tag-binding domain specifically binds FITC, biotin, PE, histidine or streptavidin. In some embodiments the tag-binding domain is antigen-binding fragment and the antigen-binding fragment is a single chain variable fragment (scFv), such as a scFv that specifically binds FITC, biotin, PE, histidine or streptavidin. In some embodiments the transmembrane domain is the hinge and transmembrane regions of the human CD8α chain. In some embodiments, the activation domain comprises one or more of the cytoplasmic region of CD28, the cytoplasmic region of CD137 (41BB), OX40, HVEM, CD3ζ and FcRε.

[0559] In some embodiments, the tag of each formulation of tagged proteins is the same or different and the tag is selected from the group consisting of fluorescein isothiocyanate (FITC), streptavidin, biotin, histidine, dinitrophenol, peridinin chlorophyll protein complex, green fluorescent protein, phycoerythrin (PE), horse radish peroxidase, palmitoylation, nitrosylation, alkalanine phosphatase, glucose oxidase, and maltose binding protein.

[0560] The tag may be conjugated to the proteins using techniques such as chemical coupling and chemical cross-linkers. Alternatively, polynucleotide vectors can be prepared that encode the tagged proteins as fusion proteins. Cell lines can then be engineered to express the tagged proteins, and the tagged proteins can be isolated from culture media, purified and used in the methods disclosed herein.

[0561] In some embodiments, tagged proteins are administered to a subject prior to, or concurrent with, or after administration of the AT-CAR-expressing T cells. In some embodiments, the disclosure provide a method of treating cancer in a subject, comprising: (a) administering a formulation of tagged proteins to a subject in need of treatment, wherein the tagged proteins bind a cancer cell in the subject, and (b) administering a therapeutically-effective population of anti-tag chimeric antigen receptor (AT-CAR)-expressing T cells to the subject, wherein the AT-CAR-expressing T cells bind the tagged proteins and induce cancer cell death, thereby treating cancer in a subject.

### C. Tandem CAR (TanCAR) Effector Cells

[0562] In some embodiments, the CAR-T therapy suitable for use in combination with the immunomodulatory fusion proteins is a tandem CAR effector cell. It has been observed that using a CAR approach for cancer treatment, tumor heterogeneity and immunoediting can cause escape from CAR treatment (Grupp et al., New Eng. J. Med (2013) 368:1509-1518). As an alternative approach, bispecific CARs, known as tandem CARs or TanCARs, have been developed in an attempt to target multiple cancer specific markers simultaneously. In a TanCAR, the extracellular domain comprises two antigen binding specificities in tandem, joined by a linker. The two binding specificities (scFvs) are thus both linked to a single transmembrane portion: one scFv being juxtaposed to the membrane and the other being in a distal position. As an exemplary TanCAR, Grada et al. (Mol Ther Nucleic Acids (2013) 2, e105) describes a TanCAR which includes a CD19-specific scFv, followed by a Gly-Ser linker and a HER2-specific scFv. The HER2-scFv was in the juxta-membrane position, and the CD19-scFv in the distal position. The TanCAR was shown to induce distinct T cell reactivity against each of the two tumor restricted antigens.

[0563] Accordingly, some aspects of the disclosure relate to a tandem chimeric antigen receptor that mediates bispecific activation and targeting of T cells. Although the present disclosure refers to bispecificity for the CAR, in some aspects the CARs are able to target three, four, or more tumor antigens. Targeting multiple antigens using CAR T cells may enhance T cell activation and/or offset tumor escape by antigen loss. TanCARs may also target multiple expressed antigens, target various tumors using the same cellular product with a broad specificity, and/or provide a better toxicity profile with a less intensely signaling CAR achieving the same results due to multiple specificity.

[0564] In some embodiments, the disclosure provides a TanCAR that includes two targeting domains. In some embodiments, the disclosure provides a multispecific TanCAR that includes three or more targeting domains. In another embodiment, the disclosure provides a first CAR and second CAR at the cell surface, each CAR comprising an antigen-binding domain, wherein the antigen-binding domain of the first CAR binds to a first tumor antigen (e.g., CD19, CD20, CD22, HER2) and the antigen-binding domain of the second CAR binds to another (different) tumor antigen. TanCARs are described in US20160303230A1 and US20170340705A1, incorporated herein by reference.

[0565] In some embodiments, the TanCAR of the disclosure targets two or more tumor antigens. Exemplary tumor antigens include one or more of CD19, CD20, CD22, k light chain, CD30, CD33, CD123, CD38, ROR1, ErbB2, ErbB3/4, EGFR vIII, carcinoembryonic antigen, EGP2, EGP40, mesothelin, TAG72, PSMA, NKG2D ligands, B7-H6, IL-13 receptor a 2, MUC1, MUC16, CA9, GD2, GD3, HMW-MAA, CD171, Lewis Y, G250/CALX, HLA-AI MAGE A1, HLA-A2 NY-ESO-1, PSC1, folate receptor-α, CD44v7/8, 8H9, NCAM, VEGF receptors, 5T4, Fetal AchR, NKG2D ligands, CD44v6, TEM1, and/or TEM8.

[0566] In some embodiments, the disclosure provides a bispecific TanCAR that targets CD19 and another tumor antigen. In some embodiments, the disclosure provides a bispecific TanCAR that targets CD22 and another tumor antigen. In some embodiments, the disclosure provides a bispecific TanCAR that targets HER2 and another tumor antigen. In some embodiments, the disclosure provides a bispecific TanCAR that targets IL13R-alpha2 and another tumor antigen.

[0567] In some embodiments, the disclosure provides a bispecific TanCAR that targets VEGF-A and another tumor antigen. In some embodiments, the disclosure provides a bispecific TanCAR that targets Tem8 and another tumor antigen. In some embodiments, the disclosure provides a bispecific TanCAR that targets FAP and another tumor antigen. In some embodiments, the disclosure provides a bispecific TanCAR that targets EphA2 and another tumor antigen. In some embodiments, the disclosure provides a bispecific TanCAR that targets one or more, two or more, three or more, or four or more of the following tumor antigens: CD19, CD22, HER2, IL13R-alpha2, VEGF-A, Tem8, FAP, or EphA2, and any combination thereof. In some embodiments, the disclosure provides a bispecific TanCAR that targets HER2 and IL13R-alpha2. In some embodiments, the disclosure provides a bispecific TanCAR that targets CD19 and CD22.

### D. Methods for Generating Chimeric Antigen Receptors and CAR Effector Cells

[0568] In some embodiments, a subject's effectors cells (e.g., T cells) are genetically modified with a chimeric antigen receptor (Sadelain et al., Cancer Discov. 3:388-398, 2013). For example, an effector cell (e.g., T cell) is provided and a recombinant nucleic acid encoding a chimeric antigen receptor is introduced into the patient-derived effector cell (e.g., T cell) to generate a CAR cell. In some embodiments, effector cells (e.g., T cells) not derived from the subject are genetically modified with a chimeric antigen receptor. For example, in some embodiments, effector cells (e.g., T cells) are allogeneic cells that have been engineered to be used as an “off the shelf” adoptive cell therapy, such as Universal Chimeric Antigen Receptor T cells (UCARTs), as developed by Cellectis. UCARTs are allogeneic CAR T cells that have been engineered to be used for treating the largest number of patients with a particular cancer type. Non-limiting examples of UCARTs under development by Cellectis include those that target the following tumor antigens: CD19, CD123, CD22, CS1 and CD38.

[0569] A variety of different methods known in the art can be used to introduce any of the nucleic acids or expression vectors disclosed herein into an effector cell (e.g., T cell). Non-limiting examples of methods for introducing nucleic acid into a an effector cell (e.g., T cell) include: lipofection, transfection (e.g., calcium phosphate transfection, transfection using highly branched organic compounds, transfection using cationic polymers, dendrimer-based transfection, optical transfection, particle-based transfection (e.g., nanoparticle transfection), or transfection using liposomes (e.g., cationic liposomes)), microinjection, electroporation, cell squeezing, sonoporation, protoplast fusion, impalefection, hydrodynamic delivery, gene gun, magnetofection, viral transfection, and nucleofection. Furthermore, the CRISPR/Cas9 genome editing technology known in the art can be used to introduce CAR nucleic acids into effector cells (e.g., T cells) and/or to introduce other genetic modifications (e.g., as described below) into effector cells (e.g., T cells) to enhance CAR cell activity (for use of CRISPR/Cas9 technology in connection with CAR T cells, see e.g., U.S. Pat. Nos. 9,890,393; 9,855,297; US 2017/0175128; US 2016/0184362; US 2016/0272999; WO 2015/161276; WO 2014/191128; CN 106755088; CN 106591363; CN 106480097; CN 106399375; CN 104894068).

[0570] Provided herein are methods that can be used to generate any of the cells or compositions described herein where each cell can express a CAR (e.g., any of the CARs described herein).

[0571] Chimeric antigen receptors (CARs) include an antigen-binding domain, a transmembrane domain, and an cytoplasmic signaling domain that includes a cytoplasmic sequence of CD3ζ sequence sufficient to stimulate a T cell when the antigen-binding domain binds to the antigen, and optionally, a cytoplasmic sequence of one or more (e.g., two, three, or four) co-stimulatory proteins (e.g., a cytoplasmic sequence of one or more of B7-H3, BTLA, CD2, CD7, CD27, CD28, CD30, CD40, CD40L, CD80, CD160, CD244, ICOS, LAG3, LFA-1, LIGHT, NKG2C, 4-1BB, OX40, PD-1, PD-L, TIM3, and a ligand that specifically binds to CD83) that provides for co-stimulation of the T cell when the antigen-binding domain binds to the antigen. In some embodiments, a CAR can further include a linker. Non-limiting aspects and features of CARs are described below. Additional aspects of CARs and CAR cells, including exemplary antigen-binding domains, linkers, transmembrane domains, and cytoplasmic signaling domains, are described in, e.g., Kakarla et al., Cancer J. 20:151-155, 2014; Srivastava et al., Trends Immunol. 36:494-502, 2015; Nishio et al., Oncoimmunology 4(2): e988098, 2015; Ghorashian et al., Br. J. Haematol. 169:463-478, 2015; Levine, Cancer Gene Ther. 22:79-84, 2015; Jensen et al., Curr. Opin. Immunol. 33:9-15, 2015; Singh et al., Cancer Gene Ther. 22:95-100, 2015; Li et al., Zhongguo Shi Yan Xue Ye Xue Za Zhi 22:1753-1756, 2014; Gill et al., Immunol. Rev. 263:68-89, 2015; Magee et al., Discov. Med. 18:265-271, 2014; Gargett et al., Front. Pharmacol. 5:235, 2014; Yuan et al., Zhongguo Shi Yan Xue Ye Xue Za Zhi 22:1137-1141, 2014; Pedgram et al., Cancer J. 20:127-133, 2014; Eshhar et al., Cancer J. 20:123-126, 2014; Ramos et al., Cancer J. 20:112-118, 2014; Maus et al., Blood 123:2625-2635, 2014; Jena et al., Curr. Hematol. Malig. Rep. 9:50-56, 2014; Maher et al., Curr. Gene Ther. 14:35-43, 2014; Riches et al., Discov. Med. 16:295-302, 2013; Cheadle et al., Immunol. Rev. 257:83-90, 2014; Davila et al., Int. J. Hematol. 99:361-371, 2014; Xu et al., Cancer Lett. 343:172-178, 2014; Kochenderfer et al., Nat. Rev. Clin. Oncol. 10:267-276, 2013; Hosing et al., Curr. Hematol. Malig. Rep. 8:60-70, 2013; Hombach et al., Curr. Mol. Med. 13:1079-1088, 2013; Xu et al., Leuk. Lymphoma 54:255-260, 2013; Gilham et al., Trends Mol. Med. 18:377-384, 2012; Lipowska-Bhalla et al., Cancer Immunol. Immunother. 61:953-962, 2012; Chmielewski et al., Cancer Immunol. Immunother. 61:1269-1277, 2013; Jena et al., Blood 116:1035-1044, 2010; Dotti et al, Immunology Reviews 257(1): 107-126, 2013; Dai et al., Journal of the National Cancer Institute 108(7): djv439, 2016; Wang and Riviere, Molecular Therapy-Oncolytics 3: 16015, 2016; U.S. Patent Application Publication Nos. 2018/0057609; 2018/0037625; 2017/0362295; 2017/0137783; 2016/0152723, 2016/0206656, 2016/0199412, 2016/0208018, 2015/0232880, 2015/0225480; 2015/0224143; 2015/0224142; 2015/0190428; 2015/0196599; 2015/0152181; 2015/0140023; 2015/0118202; 2015/0110760; 2015/0099299; 2015/0093822; 2015/0093401; 2015/0051266; 2015/0050729; 2015/0024482; 2015/0023937; 2015/0017141; 2015/0017136; 2015/0017120; 2014/0370045; 2014/0370017; 2014/0369977; 2014/0349402; 2014/0328812; 2014/0322275; 2014/0322216; 2014/0322212; 2014/0322183; 2014/0314795; 2014/0308259; 2014/0301993; 2014/0296492; 2014/0294784; 2014/0286973; 2014/0274909; 2014/0274801; 2014/0271635; 2014/0271582; 2014/0271581; 2014/0271579; 2014/0255363; 2014/0242701; 2014/0242049; 2014/0227272; 2014/0219975; 2014/0170114; 2014/0134720; 2014/0134142; 2014/0120622; 2014/0120136; 2014/0106449; 2014/0106449; 2014/0099340; 2014/0086828; 2014/0065629; 2014/0050708; 2014/0024809; 2013/0344039; 2013/0323214; 2013/0315884; 2013/0309258; 2013/0288368; 2013/0287752; 2013/0287748; 2013/0280221; 2013/0280220; 2013/0266551; 2013/0216528; 2013/0202622; 2013/0071414; 2012/0321667; 2012/0302466; 2012/0301448; 2012/0301447; 2012/0060230; 2011/0213288; 2011/0158957; 2011/0104128; 2011/0038836; 2007/0036773; and 2004/0043401. Additional aspects of CARs and CAR cells, including exemplary antigen-binding domains, linkers, transmembrane domains, and cytoplasmic signaling domains, are described in WO 2016/168595; WO 12/079000; 2015/0141347; 2015/0031624; 2015/0030597; 2014/0378389; 2014/0219978; 2014/0206620; 2014/0037628; 2013/0274203; 2013/0225668; 2013/0116167; 2012/0230962; 2012/0213783; 2012/0093842; 2012/0071420; 2012/0015888; 2011/0268754; 2010/0297093; 2010/0158881; 2010/0034834; 2010/0015113; 2009/0304657; 2004/0043401; 2014/0322253; 2015/0118208; 2015/0038684; 2014/0024601; 2012/0148552; 2011/0223129; 2009/0257994; 2008/0160607; 2008/0003683; 2013/0121960; 2011/0052554; and 2010/0178276.

### Antigen Binding Domains

[0572] Antigen binding domains included in the chimeric antigen receptor (CAR) can specifically bind to an antigen (e.g., a tumor associated antigen (TAA) or an antigen that is not expressed on a non-cancerous cell) or a universal receptor (e.g., a tag). Non-limiting examples of an antigen binding domain include: a monoclonal antibody (e.g., IgG1, IgG2, IgG3, IgG4, IgM, IgE, and IgD) (e.g., a fully human or a chimeric (e.g., a humanized) antibody), an antigen binding fragment of an antibody (e.g., Fab, Fab′, or F(ab′)₂ fragments) (e.g., a fragment of a fully human or a chimeric (e.g., humanized) antibody), a diabody, a triabody, a tetrabody, a minibody, a scFv, scFv-Fc, (scFv)₂, scFab, bis-scFv, hc-IgG, a BiTE, a single domain antibody (e.g., a V-NAR domain or a VhH domain), IgNAR, and a multispecific (e.g., bispecific antibody) antibody. Methods of making these antigen-binding domains are known in the art.

[0573] In some embodiments, an antigen binding domain includes at least one (e.g., one, two, three, four, five, or six) CDR (e.g., any of the three CDRs from an immunoglobulin light chain variable domain or any of the three CDRs from an immunoglobulin heavy chain variable domain) of an antibody that is capable of specifically binding to the target antigen, such as immunoglobulin molecules (e.g., light or heavy chain immunoglobulin molecules) and immunologically-active (antigen-binding) fragments of immunoglobulin molecules.

[0574] In some embodiments, an antigen binding domain is a single-chain antibody (e.g., a V-NAR domain or a V_{H}H domain, or any of the single-chain antibodies as described herein). In some embodiments, an antigen binding domain is a whole antibody molecule (e.g., a human, humanized, or chimeric antibody) or a multimeric antibody (e.g., a bi-specific antibody).

[0575] In some embodiments, antigen-binding domains include antibody fragments and multispecific (e.g., bi-specific) antibodies or antibody fragments. Examples of antibodies and antigen-binding fragments thereof include, but are not limited to: single-chain Fvs (scFvs), Fab fragments, Fab′ fragments, F(ab′)₂, disulfide-linked Fvs (sdFvs), Fvs, and fragments containing either a VL or a VH domain.

[0576] Additional antigen binding domains provided herein are polyclonal, monoclonal, multispecific (multimeric, e.g., bi-specific), human antibodies, chimeric antibodies (e.g., human-mouse chimera), single-chain antibodies, intracellularly-made antibodies (i.e., intrabodies), and antigen-binding fragments thereof. The antibodies or antigen-binding fragments thereof can be of any type (e.g., IgG, IgE, IgM, IgD, IgA, and IgY), class (e.g., IgG₁, IgG₂, IgG₃, IgG₄, IgA₁, and IgA₂), or subclass. In some embodiments, the antigen binding domain is an IgG₁ antibody or antigen-binding fragment thereof. In some examples, the antigen binding domain is an IgG₄ antibody or antigen-binding fragment thereof. In some embodiments, the antigen binding domain is an immunoglobulin comprising a heavy and light chain.

[0577] Additional examples of antigen binding domains are antigen-binding fragments of an IgG (e.g., an antigen-binding fragment of IgG1, IgG2, IgG3, or IgG4) (e.g., an antigen-binding fragment of a human or humanized IgG, e.g., human or humanized IgG1, IgG2, IgG3, or IgG4), an antigen-binding fragment of an IgA (e.g., an antigen-binding fragment of IgA1 or IgA2) (e.g., an antigen-binding fragment of a human or humanized IgA, e.g., a human or humanized IgA1 or IgA2), an antigen-binding fragment of an IgD (e.g., an antigen-binding fragment of a human or humanized IgD), an antigen-binding fragment of an IgE (e.g., an antigen-binding fragment of a human or humanized IgE), or an antigen-binding fragment of an IgM (e.g., an antigen-binding fragment of a human or humanized IgM).

[0578] In some embodiments, an antigen binding domain can bind to a particular antigen (e.g., a tumor-associated antigen) with an affinity (K_{D}) about or less than 1×10⁻⁷ M (e.g., about or less than 1×10⁻⁸ M, about or less than 5×10⁻⁹ M, about or less than 2×10⁻⁹ M, or about or less than 1×10⁻⁹ M), e.g., in saline or in phosphate buffered saline.

[0579] In some embodiments, CAR effector cells (e.g., CAR T cells) comprise a CAR molecule that binds to a tumor antigen (e.g., comprises a tumor antigen binding domain). In some embodiments, the CAR molecule comprises an antigen binding domain that recognizes a tumor antigen of a solid tumor (e.g., breast cancer, colon cancer, etc.). In some embodiments, the CAR molecule is a tandem CAR molecule as described supra, which comprises at least two antigen binding domains. In some embodiments, the CAR molecule comprises an antigen binding domain that recognizes a tumor antigen of a hematologic malignancy (e.g., leukemia, acute lymphocytic leukemia, acute myelocytic leukemia, acute promyelocytic leukemia, chronic leukemia, chronic myelocytic (granulocytic) leukemia, chronic lymphocytic leukemia, mantle cell lymphoma, primary central nervous system lymphoma, Burkitt's lymphoma and marginal zone B cell lymphoma, Polycythemia vera, Hodgkin's disease, non-Hodgkin's disease, multiple myeloma, etc.).

[0580] In some embodiments, the tumor antigen is a tumor-specific antigen (TSA). A TSA is unique to tumor cells and does not occur on other cells in the body. In some embodiments, the tumor antigen is a tumor-associated antigen (TAA). A TAA is not unique to a tumor cell and instead is also expressed on a normal cell under conditions that fail to induce a state of immunologic tolerance to the antigen. The expression of the antigen on the tumor may occur under conditions that enable the immune system to respond to the antigen. In some embodiments, a TAA is expressed on normal cells during fetal development when the immune system is immature and unable to respond or is normally present at extremely low levels on normal cells but which are expressed at much higher levels on tumor cells.

[0581] In certain embodiments, the tumor-associated antigen is determined by sequencing a patient's tumor cells and identifying mutated proteins only found in the tumor. These antigens are referred to as “neoantigens.” Once a neoantigen has been identified, therapeutic antibodies can be produced against it and used in the methods described herein.

[0582] In some embodiments, the tumor antigen is an epithelial cancer antigen, (e.g., breast, gastrointestinal, lung), a prostate specific cancer antigen (PSA) or prostate specific membrane antigen (PSMA), a bladder cancer antigen, a lung (e.g., small cell lung) cancer antigen, a colon cancer antigen, an ovarian cancer antigen, a brain cancer antigen, a gastric cancer antigen, a renal cell carcinoma antigen, a pancreatic cancer antigen, a liver cancer antigen, an esophageal cancer antigen, a head and neck cancer antigen, or a colorectal cancer antigen. In certain embodiments, the tumor antigen is a lymphoma antigen (e.g., non-Hodgkin's lymphoma or Hodgkin's lymphoma), a B-cell lymphoma cancer antigen, a leukemia antigen, a myeloma (e.g., multiple myeloma or plasma cell myeloma) antigen, an acute lymphoblastic leukemia antigen, a chronic myeloid leukemia antigen, or an acute myelogenous leukemia antigen.

[0583] Tumor antigens, (e.g. tumor-associated antigens (TAAs) and tumor-specific antigens (TSAs)) that may be targeted by CAR effector cells (e.g., CAR T cells), include, but are not limited to, 1GH-IGK, 43-9F, 5T4, 791Tgp72, acyclophilin C-associated protein, alphafetoprotein (AFP), α-actinin-4, A3, antigen specific for A33 antibody, ART-4, B7, Ba 733, BAGE, BCR-ABL, beta-catenin, beta-HCG, BrE3-antigen, BCA225, BTAA, CA125, CA 15-3\CA 27.29\BCAA, CA195, CA242, CA-50, CAM43, CAMEL, CAP-1, carbonic anhydrase IX, c-Met, CA19-9, CA72-4, CAM 17.1, CASP-8/m, CCCL19, CCCL21, CD1, CD1a, CD2, CD3, CD4, CD5, CD8, CD11A, CD14, CD15, CD16, CD18, CD19, CD20, CD21, CD22, CD23, CD25, CD29, CD30, CD32b, CD33, CD37, CD38, CD40, CD40L, CD44, CD45, CD46, CD52, CD54, CD55, CD59, CD64, CD66a-e, CD67, CD68, CD70, CD70L, CD74, CD79a, CD79b, CD80, CD83, CD95, CD126, CD132, CD133, CD138, CD147, CD154, CDC27, CDK4, CDK4m, CDKN2A, CO-029, CTLA4, CXCR4, CXCR7, CXCL12, HIF-1a, colon-specific antigen-p (CSAp), CEA (CEACAM5), CEACAM6, c-Met, DAM, E2A-PRL, EGFR, EGFRvIII, EGP-1 (TROP-2), EGP-2, ELF2-M, Ep-CAM, fibroblast growth factor (FGF), FGF-5, Flt-1, Flt-3, folate receptor, G250 antigen, Ga733VEpCAM, GAGE, gp100, GRO-β, H4-RET, HLA-DR, HM1.24, human chorionic gonadotropin (HCG) and its subunits, HER2/neu, HMGB-1, hypoxia inducible factor (HIF-1), HSP70-2M, HST-2, HTgp-175, Ia, IGF-1R, IFN-γ, IFN-α, IFN-β, IFN-λ, IL-4R, IL-6R, IL-13R, IL-15R, IL-3R, IL-117R, IL-18R, IL-2, IL-6, IL-8, IL-12, IL-15, IL-17, IL-18, IL-23, IL-25, insulin-like growth factor-1 (IGF-1), KC4-antigen, KSA, KS-1-antigen, KS1-4, LAGE-1a, Le-Y, LDR/FUT, M344, MA-50, macrophage migration inhibitory factor (MIF), MAGE, MAGE-1, MAGE-3, MAGE-4, MAGE-5, MAGE-6, MART-1, MART-2, TRAG-3, mCRP, MCP-1, MIP-1A, MIP-1B, MIF, MG7-Ag, MOV18, MUC1, MUC2, MUC3, MUC4, MUC5ac, MUC13, MUC16, MUM-1/2, MUM-3, MYL-RAR, NB/70K, Nm23H1, NuMA, NCA66, NCA95, NCA90, NY-ESO-1, p15, p16, p185erbB2, p180erbB3, PAM4 antigen, pancreatic cancer mucin, PD1 receptor (PD-1), PD-1 receptor ligand 1 (PD-L1), PD-1 receptor ligand 2 (PD-L2), PI5, placental growth factor, p53, PLAGL2, Pmel17 prostatic acid phosphatase, PSA, PRAME, PSMA, PlGF, ILGF, ILGF-1R, IL-6, IL-25, RCAS1, RS5, RAGE, RANTES, Ras, T101, SAGE, S100, survivin, survivin-2B, SDDCAG16, TA-90\Mac2 binding protein, TAAL6, TAC, TAG-72, TLP, tenascin, TRAIL receptors, TRP-1, TRP-2, TSP-180, TNF-α, Tn antigen, Thomson-Friedenreich antigens, tumor necrosis antigens, tyrosinase, VEGFR, ED-B fibronectin, WT-1, 17-1A-antigen, complement factors C3, C3a, C3b, C5a, C5, an angiogenesis marker, bcl-2, bcl-6, and K-ras, an oncogene marker and an oncogene product (see, e.g., Sensi et al., Clin Cancer Res 2006, 12:5023-32; Parmiani et al., J Immunol 2007, 178:1975-79; Novellino et al. Cancer Immunol Immunother 2005, 54:187-207).

[0584] In some embodiments, the tumor antigen is a viral antigen derived from a virus associated with a human chronic disease or cancer (such as cervical cancer). For example, in some embodiments, the viral antigen is derived from Epstein-Barr virus (EBV), HPV antigens E6 and/or E7, hepatitis C virus (HCV), hepatitis B virus (HBV), or cytomegalovirus (CMV).

[0585] Exemplary cancers or tumors and specific tumor antigens associated with such tumors (but not exclusively), include acute lymphoblastic leukemia (etv6, aml1, cyclophilin b), B cell lymphoma (Ig-idiotype), glioma (E-cadherin, α-catenin, β-catenin, γ-catenin, p120ctn), bladder cancer (p21ras), biliary cancer (p21ras), breast cancer (MUC family, HER2/neu, c-erbB-2), cervical carcinoma (p53, p21ras), colon carcinoma (p21ras, HER2/neu, c-erbB-2, MUC family), colorectal cancer (Colorectal associated antigen (CRC)-CO17-1A/GA733, APC), choriocarcinoma (CEA), epithelial cell cancer (cyclophilin b), gastric cancer (HER2/neu, c-erbB-2, ga733 glycoprotein), hepatocellular cancer (α-fetoprotein), Hodgkins lymphoma (Imp-1, EBNA-1), lung cancer (CEA, MAGE-3, NY-ESO-1), lymphoid cell-derived leukemia (cyclophilin b), melanoma (p5 protein, gp75, oncofetal antigen, GM2 and GD2 gangliosides, Melan-A/MART-1, cdc27, MAGE-3, p21ras, gp100), mycloma (MUC family, p21ras), non-small cell lung carcinoma (HER2/neu, c-erbB-2), nasopharyngeal cancer (Imp-1, EBNA-1), ovarian cancer (MUC family, HER2/neu, c-erbB-2), prostate cancer (Prostate Specific Antigen (PSA) and its antigenic epitopes PSA-1, PSA-2, and PSA-3, PSMA, HER2/neu, c-erbB-2, ga733 glycoprotein), renal cancer (HER2/neu, c-erbB-2), squamous cell cancers of the cervix and esophagus, testicular cancer (NY-ESO-1), and T cell leukemia (HTLV-1 epitopes), and viral products or proteins.

[0586] In some embodiments, the immune effector cell comprising a CAR molecule (e.g., CAR T cell) useful in the methods disclosed herein expresses a CAR comprising a mesothelin binding domain (i.e., the CAR T cell specifically recognizes mesothelin). Mesothelin is a tumor antigen that is overexpressed in a variety of cancers including ovarian, lung and pancreatic cancers.

[0587] In some embodiments, the immune effector cell comprising a CAR molecule (e.g., CAR T cell) useful in the methods disclosed herein expresses a CAR comprising a CD19 binding domain. In some embodiments, the immune effector cell comprising a CAR molecule (e.g., CAR T cell) useful in the methods disclosed herein expresses a CAR comprising a HER2 binding domain. In some embodiments, the immune effector cell comprising a CAR molecule (e.g., CAR T cell) useful in the methods disclosed herein expresses a CAR comprising an EGFR binding domain.

[0588] In some embodiments, the CAR effector cell expressing a CAR comprising a CD19 targeting or binding domain is Kymriah™ (tisagenlecleucel; Novartis; see WO 2016109410, herein incorporated by reference in its entirety) or Yescarta™ (axicabtagene ciloleucel; Kite; see US 20160346326, herein incorporated by reference in its entirety).

### Linker

[0589] Provided herein are CARs that can optionally include a linker (1) between the antigen binding domain and the transmembrane domain, and/or (2) between the transmembrane domain and the cytoplasmic signaling domain. In some embodiments, the linker can be a polypeptide linker. For example, the linker can have a length of between about 1 amino acid and about 500 amino acids, about 400 amino acids, about 300 amino acids, about 200 amino acids, about 100 amino acids, about 90 amino acids, about 80 amino acids, about 70 amino acids, about 60 amino acids, about 50 amino acids, about 40 amino acids, about 35 amino acids, about 30 amino acids, about 25 amino acids, about 20 amino acids, about 18 amino acids, about 16 amino acids, about 14 amino acids, about 12 amino acids, about 10 amino acids, about 8 amino acids, about 6 amino acids, about 4 amino acids, or about 2 amino acids; about 2 amino acids to about 500 amino acids, about 400 amino acids, about 300 amino acids, about 200 amino acids, about 100 amino acids, about 90 amino acids, about 80 amino acids, about 70 amino acids, about 60 amino acids, about 50 amino acids, about 40 amino acids, about 35 amino acids, about 30 amino acids, about 25 amino acids, about 20 amino acids, about 18 amino acids, about 16 amino acids, about 14 amino acids, about 12 amino acids, about 10 amino acids, about 8 amino acids, about 6 amino acids, or about 4 amino acids; about 4 amino acids to about 500 amino acids, about 400 amino acids, about 300 amino acids, about 200 amino acids, about 100 amino acids, about 90 amino acids, about 80 amino acids, about 70 amino acids, about 60 amino acids, about 50 amino acids, about 40 amino acids, about 35 amino acids, about 30 amino acids, about 25 amino acids, about 20 amino acids, about 18 amino acids, about 16 amino acids, about 14 amino acids, about 12 amino acids, about 10 amino acids, about 8 amino acids, or about 6 amino acids; about 6 amino acids to about 500 amino acids, about 400 amino acids, about 300 amino acids, about 200 amino acids, about 100 amino acids, about 90 amino acids, about 80 amino acids, about 70 amino acids, about 60 amino acids, about 50 amino acids, about 40 amino acids, about 35 amino acids, about 30 amino acids, about 25 amino acids, about 20 amino acids, about 18 amino acids, about 16 amino acids, about 14 amino acids, about 12 amino acids, about 10 amino acids, or about 8 amino acids; about 8 amino acids to about 500 amino acids, about 400 amino acids, about 300 amino acids, about 200 amino acids, about 100 amino acids, about 90 amino acids, about 80 amino acids, about 70 amino acids, about 60 amino acids, about 50 amino acids, about 40 amino acids, about 35 amino acids, about 30 amino acids, about 25 amino acids, about 20 amino acids, about 18 amino acids, about 16 amino acids, about 14 amino acids, about 12 amino acids, or about 10 amino acids; about 10 amino acids to about 500 amino acids, about 400 amino acids, about 300 amino acids, about 200 amino acids, about 100 amino acids, about 90 amino acids, about 80 amino acids, about 70 amino acids, about 60 amino acids, about 50 amino acids, about 40 amino acids, about 35 amino acids, about 30 amino acids, about 25 amino acids, about 20 amino acids, about 18 amino acids, about 16 amino acids, about 14 amino acids, or about 12 amino acids; about 12 amino acids to about 500 amino acids, about 400 amino acids, about 300 amino acids, about 200 amino acids, about 100 amino acids, about 90 amino acids, about 80 amino acids, about 70 amino acids, about 60 amino acids, about 50 amino acids, about 40 amino acids, about 35 amino acids, about 30 amino acids, about 25 amino acids, about 20 amino acids, about 18 amino acids, about 16 amino acids, or about 14 amino acids; about 14 amino acids to about 500 amino acids, about 400 amino acids, about 300 amino acids, about 200 amino acids, about 100 amino acids, about 90 amino acids, about 80 amino acids, about 70 amino acids, about 60 amino acids, about 50 amino acids, about 40 amino acids, about 35 amino acids, about 30 amino acids, about 25 amino acids, about 20 amino acids, about 18 amino acids, or about 16 amino acids; about 16 amino acids to about 500 amino acids, about 400 amino acids, about 300 amino acids, about 200 amino acids, about 100 amino acids, about 90 amino acids, about 80 amino acids, about 70 amino acids, about 60 amino acids, about 50 amino acids, about 40 amino acids, about 35 amino acids, about 30 amino acids, about 25 amino acids, about 20 amino acids, or about 18 amino acids; about 18 amino acids to about 500 amino acids, about 400 amino acids, about 300 amino acids, about 200 amino acids, about 100 amino acids, about 90 amino acids, about 80 amino acids, about 70 amino acids, about 60 amino acids, about 50 amino acids, about 40 amino acids, about 35 amino acids, about 30 amino acids, about 25 amino acids, or about 20 amino acids; about 20 amino acids to about 500 amino acids, about 400 amino acids, about 300 amino acids, about 200 amino acids, about 100 amino acids, about 90 amino acids, about 80 amino acids, about 70 amino acids, about 60 amino acids, about 50 amino acids, about 40 amino acids, about 35 amino acids, about 30 amino acids, or about 25 amino acids; about 25 amino acids to about 500 amino acids, about 400 amino acids, about 300 amino acids, about 200 amino acids, about 100 amino acids, about 90 amino acids, about 80 amino acids, about 70 amino acids, about 60 amino acids, about 50 amino acids, about 40 amino acids, about 35 amino acids, or about 30 amino acids; about 30 amino acids to about 500 amino acids, about 400 amino acids, about 300 amino acids, about 200 amino acids, about 100 amino acids, about 90 amino acids, about 80 amino acids, about 70 amino acids, about 60 amino acids, about 50 amino acids, about 40 amino acids, or about 35 amino acids; about 35 amino acids to about 500 amino acids, about 400 amino acids, about 300 amino acids, about 200 amino acids, about 100 amino acids, about 90 amino acids, about 80 amino acids, about 70 amino acids, about 60 amino acids, about 50 amino acids, or about 40 amino acids; about 40 amino acids to about 500 amino acids, about 400 amino acids, about 300 amino acids, about 200 amino acids, about 100 amino acids, about 90 amino acids, about 80 amino acids, about 70 amino acids, about 60 amino acids, or about 50 amino acids; about 50 amino acids to about 500 amino acids, about 400 amino acids, about 300 amino acids, about 200 amino acids, about 100 amino acids, about 90 amino acids, about 80 amino acids, about 70 amino acids, or about 60 amino acids; about 60 amino acids to about 500 amino acids, about 400 amino acids, about 300 amino acids, about 200 amino acids, about 150 amino acids, about 100 amino acids, about 90 amino acids, about 80 amino acids, or about 70 amino acids; about 70 amino acids to about 500 amino acids, about 400 amino acids, about 300 amino acids, about 200 amino acids, about 100 amino acids, about 90 amino acids, or about 80 amino acids; about 80 amino acids to about 500 amino acids, about 400 amino acids, about 300 amino acids, about 200 amino acids, about 100 amino acids, or about 90 amino acids; about 90 amino acids to about 500 amino acids, about 400 amino acids, about 300 amino acids, about 200 amino acids, or about 100 amino acids; about 100 amino acids to about 500 amino acids, about 400 amino acids, about 300 amino acids, or about 200 amino acids; about 200 amino acids to about 500 amino acids, about 400 amino acids, or about 300 amino acids; about 300 amino acids to about 500 amino acids or about 400 amino acids; or about 400 amino acids to about 500 amino acids.

[0590] Additional examples and aspects of linkers are described in the references cited herein, and are thus incorporated in their entirety herein.

### Transmembrane Domains

[0591] In some embodiments, the CARs described herein also include a transmembrane domain. In some embodiments, the transmembrane domain is naturally associated with a sequence in the cytoplasmic domain. In some embodiments, the transmembrane domain can be modified by one or more (e.g., two, three, four, five, six, seven, eight, nine, or ten) amino acid substitutions to avoid the binding of the domain to other transmembrane domains (e.g., the transmembrane domains of the same or different surface membrane proteins) to minimize interactions with other members of the receptor complex.

[0592] In some embodiments, the transmembrane domain may be derived from a natural source. In some embodiments, the transmembrane domain may be derived from any membrane-bound or transmembrane protein. Non-limiting examples of transmembrane domains that may be used herein may be derived from (e.g., comprise at least the transmembrane sequence or a part of the transmembrane sequence of) the alpha, beta, or zeta chain of the T-cell receptor, CD28, CD3 epsilon, CD33, CD37, CD64, CD80, CD45, CD4, CD5, CD8, CD9, CD16, CD22, CD86, CD134, CD137 or CD154.

[0593] In some embodiments, the transmembrane domain may be synthetic. For example, in some embodiments where the transmembrane domain is from a synthetic source, the transmembrane domain may include (e.g., predominantly include) hydrophobic residues (e.g., leucine and valine). In some embodiments, the synthetic transmembrane domain will include at least one (e.g., at least two, at least three, at least four, at least five, or at least six) triplet of phenylalanine, tryptophan, and valine at the end of a synthetic transmembrane domain. In some embodiments, the transmembrane domain of a CAR can include a CD8 hinge domain.

[0594] Additional specific examples of transmembrane domains are described in the references cited herein.

### Cytoplasmic Domains

[0595] Also provided herein are CAR molecules that comprise, e.g., a cytoplasmic signaling domain that includes a cytoplasmic sequence of CD3ζ sufficient to stimulate a T cell when the antigen binding domain binds to the antigen, and optionally, a cytoplasmic sequence of one or more of co-stimulatory proteins (e.g., a cytoplasmic sequence of one or more of CD27, CD28, 4-1BB, OX40, CD30, CD40L, CD40, PD-1, PD-L1, ICOS, LFA-1, CD2, CD7, CD160, LIGHT, BTLA, TIM3, CD244, CD80, LAG3, NKG2C, B7-H3, a ligand that specifically binds to CD83, and any of the ITAM sequences described herein or known in the art) that provides for co-stimulation of the T cell. The stimulation of a CAR immune effector cell can result in the activation of one or more anti-cancer activities of the CAR immune effector cell. For example, in some embodiments, stimulation of a CAR immune effector cell can result in an increase in the cytolytic activity or helper activity of the CAR immune effector cell, including the secretion of cytokines. In some embodiments, the entire intracellular signaling domain of a co-stimulatory protein is included in the cytoplasmic signaling domain. In some embodiments, the cytoplasmic signaling domain includes a truncated portion of an intracellular signaling domain of a co-stimulatory protein (e.g., a truncated portion of the intracellular signaling domain that transduces an effector function signal in the CAR immune effector cell). Non-limiting examples of intracellular signaling domains that can be included in a cytoplasmic signaling domain include the cytoplasmic sequences of the T cell receptor (TCR) and co-receptors that act in concert to initiate signal transduction following antigen receptor engagement, as well as any variant of these sequences including at least one (e.g., one, two, three, four, five, six, seven, eight, nine, or ten) substitution and have the same or about the same functional capability.

[0596] In some embodiments, a cytoplasmic signaling domain can include two distinct classes of cytoplasmic signaling sequences: signaling sequences that initiate antigen-dependent activation through the TCR (primary cytoplasmic signaling sequences) (e.g., a CD3ζ cytoplasmic signaling sequence) and a cytoplasmic sequence of one or more of co-stimulatory proteins that act in an antigen-independent manner to provide a secondary or co-stimulatory signal (secondary cytoplasmic signaling sequences).

[0597] In some embodiments, the cytoplasmic domain of a CAR can be designed to include the CD3ζ signaling domain by itself or combined with any other desired cytoplasmic signaling sequence(s) useful in the context of a CAR. In some examples, the cytoplasmic domain of a CAR can include a CD3ζ chain portion and a costimulatory cytoplasmic signaling sequence.

[0598] The costimulatory cytoplasmic signaling sequence refers to a portion of a CAR including a cytoplasmic signaling sequence of a costimulatory protein (e.g., CD27, CD28, 4-IBB (CD 137), OX40, CD30, CD40, PD-1, ICOS, lymphocyte function-associated antigen-1 (LFA-1), CD2, CD7, LIGHT, NKG2C, B7-H3, and a ligand that specifically binds with CD83).

[0599] In some embodiments, the cytoplasmic signaling sequences within the cytoplasmic signaling domain of a CAR are positioned in a random order. In some embodiments, the cytoplasmic signaling sequences within the cytoplasmic signaling domain of a CAR are linked to each other in a specific order. In some embodiments, a linker (e.g., any of the linkers described herein) can be used to form a linkage between different cytoplasmic signaling sequences.

[0600] In some embodiments, the cytoplasmic signaling domain is designed to include the cytoplasmic signaling sequence of CD3ζ and the cytoplasmic signaling sequence of the costimulatory protein CD28. In some embodiments, the cytoplasmic signaling domain is designed to include the cytoplasmic signaling sequence of CD3ζ and the cytoplasmic signaling sequence of costimulatory protein 4-IBB. In some embodiments, the cytoplasmic signaling domain is designed to include the cytoplasmic signaling sequence of CD3ζ and the cytoplasmic signaling sequences of costimulatory proteins CD28 and 4-1BB. In some embodiments, the cytoplasmic signaling domain does not include the cytoplasmic signaling sequences of 4-1BB.

### Additional Modification of CAR T Cells

[0601] In another embodiment, the therapeutic efficacy of CAR effector cells (e.g., CAR T cells) is enhanced by disruption of a methylcytosine dioxygenase gene (e.g., Tet1, Tet2, Tet3), which leads to decreased total levels of 5-hydroxymethylcytosine in association with enhanced proliferation, regulation of effector cytokine production and degranulation, and thereby increases CAR effector cell (e.g., CAR T cell) proliferation and/or function, as described in PCT Publication WO 2017/049166. Thus, an effector cell (e.g., T cell) can be engineered to express a CAR and wherein expression and/or function of Tet1, Tet2 and/or Tet3 in said effector cell (e.g., T cell) has been reduced or eliminated.

[0602] In another embodiment, the therapeutic efficacy of CAR effector cells (e.g., CAR T cells) is enhanced by using an effector cell (e.g., T cell) that constitutively expresses a CAR (referred to as a nonconditional CAR) and conditionally expresses another agent useful for treating cancer, as described in PCT Publication WO 2016/126608 and US Publication No. 2018/0044424. In such embodiments, the conditionally expressed agent is expressed upon activation of the effector cell (e.g., T cell), e.g., the binding of the nonconditional CAR to its target. In one embodiment, the conditionally expressed agent is a CAR (referred to herein as a conditional CAR). In another embodiment, the conditionally expressed agent inhibits a checkpoint inhibitor of the immune response. In another embodiment, the conditionally expressed agent improves or enhances the efficacy of a CAR, and can include a cytokine.

[0603] In another embodiment, the therapeutic efficacy of CAR T cells is enhanced by modifying the CAR T cell with a nucleic acid that is capable of altering (e.g., downmodulating) expression of an endogenous gene selected from the group consisting of TCR a chain, TCR 3 chain, beta-2 microglobulin, a HLA molecule, CTLA-4, PDI, and FAS, as described in PCT Publication WO 2016/069282 and US Publication No. 2017/0335331.

[0604] In another embodiment, the therapeutic efficacy of CAR T cells is enhanced by co-expressing in the T cells the CAR and one or more enhancers of T cell priming (“ETPs”), as described in PCT Publication WO 2015/112626 and US Publication No. 2016/0340406. The addition of an ETP component to the CAR T cell confers enhanced “professional” antigen-presenting cell (APC) function. In an embodiment, the CAR and one or more ETPs are transiently co-expressed in the T cell. Thus, the engineered T cells are safe (given the transient nature of the CARIETP expression), and induce prolonged immunity via APC function.

[0605] In another embodiment, the therapeutic efficacy of CAR T cells is enhanced by co-expressing in the T cells a CAR and an inhibitory membrane protein (IMP) comprising a binding (or dimerization) domain, as described in PCT Publication WO 2016/055551 and US Publication No. 2017/0292118. The CAR and the IMP are made both reactive to a soluble compound, especially through a second binding domain comprised within the CAR, thereby allowing the co-localization, by dimerization or ligand recognition, of the inhibitory signaling domain borne by the IMP and of the signal transducing domain borne by the CAR, having the effect of turning down the CAR activation. The inhibitory signaling domain is preferably the programmed death-1 (PD-1), which attenuates T-cell receptor (TCR)-mediated activation of IL-2 production and T-cell proliferation.

[0606] In another embodiment, the therapeutic efficacy of CAR T cells is enhanced using a system where controlled variations in the conformation of the extracellular portion of a CAR containing the antigen-binding domain is obtained upon addition of small molecules, as described in PCT Publication WO 2017/032777. This integrated system switches the interaction between the antigen and the antigen binding domain between on/off states. By being able to control the conformation of the extracellular portion of a CAR, downstream functions of the CAR T cell, such as cytotoxicity, can be directly modulated. Thus, a CAR can be characterized in that it comprises: a) at least one ectodomain which comprises: i) an extracellular antigen binding domain; and ii) a switch domain comprising at least a first multimerizing ligand-binding domain and a second multimerizing ligand-binding domain which are capable of binding to a predetermined multivalent ligand to form a multimer comprising said two binding domains and the multivalent ligand to which they are capable of binding; b) at least one transmembrane domain; and c) at least one endodomain comprising a signal transducing domain and optionally a co-stimulatory domain; wherein the switch domain is located between the extracellular antigen binding domain and the transmembrane domain.

### II. Tumor-Associated Antigen Targeting Antibodies

[0607] In some aspects, the disclosure provides immunomodulatory fusion proteins to be used or performed in conjunction with antibodies that target tumor antigens.

[0608] Therapeutic monoclonal antibodies have been conceived as a class of pharmaceutically active agents which should allow tumor selective treatment by targeting tumor selective antigens or epitopes.

[0609] Methods of producing antibodies, and antigen-binding fragments thereof, are well known in the art and are disclosed in, e.g., U.S. Pat. Nos. 7,247,301, 7,923,221, and U.S. Patent Application 2008/0138336, all of which are herein incorporated by reference in their entirety.

[0610] Therapeutic antibodies that can be used in the methods of the present disclosure include, but are not limited to, any of the art-recognized anti-cancer antibodies that are approved for use, in clinical trials, or in development for clinical use. In certain embodiments, more than one anti-cancer antibody can be included in the combination therapy of the present disclosure.

[0611] Non-limiting examples of anti-cancer antibodies include the following, without limitation: trastuzumab (HERCEPTIN™, by Genentech, South San Francisco, Calif.), which is used to treat HER-2/neu positive breast cancer or metastatic breast cancer; bevacizumab (AVASTIN™ by Genentech), which are used to treat colorectal cancer, metastatic colorectal cancer, breast cancer, metastatic breast cancer, non-small cell lung cancer, or renal cell carcinoma; rituximab (RITUXAN™ by Genentech), which is used to treat non-Hodgkin's lymphoma or chronic lymphocytic leukemia; pertuzumab (OMNITARG™ by Genentech), which is used to treat breast cancer, prostate cancer, non-small cell lung cancer, or ovarian cancer; cetuximab (ERBITUX™ by ImClone Systems Incorporated, New York, N.Y.), which can be used to treat colorectal cancer, metastatic colorectal cancer, lung cancer, head and neck cancer, colon cancer, breast cancer, prostate cancer, gastric cancer, ovarian cancer, brain cancer, pancreatic cancer, esophageal cancer, renal cell cancer, prostate cancer, cervical cancer, or bladder cancer; IMC-1C11 (ImClone Systems Incorporated), which is used to treat colorectal cancer, head and neck cancer, as well as other potential cancer targets; tositumomab and tositumomab and iodine I 131 (BEXXAR XM by Corixa Corporation, Seattle, Wash.), which is used to treat non-Hodgkin's lymphoma, which can be CD20 positive, follicular, non-Hodgkin's lymphoma, with and without transformation, whose disease is refractory to Rituximab and has relapsed following chemotherapy; In¹¹¹ ibirtumomab tiuxetan; Y⁹⁰ ibirtumomab tiuxetan; In¹¹¹ ibirtumomab tiuxetan and Y⁹⁰ ibirtumomab tiuxetan (ZEVALIN™ by Biogen Idee, Cambridge, Mass.), which is used to treat lymphoma or non-Hodgkin's lymphoma, which can include relapsed follicular lymphoma; relapsed or refractory, low grade or follicular non-Hodgkin's lymphoma; or transformed B-cell non-Hodgkin's lymphoma; EMD 7200 (EMD Pharmaceuticals, Durham, N.C.), which is used for treating non-small cell lung cancer or cervical cancer; SGN-30 (a genetically engineered monoclonal antibody targeted to CD30 antigen by Seattle Genetics, Bothell, Wash.), which is used for treating Hodgkin's lymphoma or non-Hodgkin's lymphoma; SGN-15 (a genetically engineered monoclonal antibody targeted to a Lewisy-related antigen that is conjugated to doxorubicin by Seattle Genetics), which is used for treating non-small cell lung cancer; SGN-33 (a humanized antibody targeted to CD33 antigen by Seattle Genetics), which is used for treating acute myeloid leukemia (AML) and myelodysplasia syndromes (MDS); SGN-40 (a humanized monoclonal antibody targeted to CD40 antigen by Seattle Genetics), which is used for treating multiple myeloma or non-Hodgkin's lymphoma;

SGN-35 (a genetically engineered monoclonal antibody targeted to a CD30 antigen that is conjugated to auristatin E by Seattle Genetics), which is used for treating non-Hodgkin's lymphoma; SGN-70 (a humanized antibody targeted to CD70 antigen by Seattle Genetics), which is used for treating renal cancer and nasopharyngeal carcinoma; SGN-75 (a conjugate comprised of the SGN70 antibody and an Auristatin derivative by Seattle Genetics); and SGN-17/19 (a fusion protein containing antibody and enzyme conjugated to melphalan prodrug by Seattle Genetics), which is used for treating melanoma or metastatic melanoma.

[0612] It should be understood that the therapeutic antibodies to be used in the methods of the present disclosure are not limited to those described supra. For example, the following approved therapeutic antibodies can also be used in the methods of the disclosure: brentuximab vedotin (ADCETRIS™) for anaplastic large cell lymphoma and Hodgkin lymphoma, ipilimumab (MDX-101; YERVOY™) for melanoma, ofatumumab (ARZERRA™) for chronic lymphocytic leukemia, panitumumab (VECTIBIX™) for colorectal cancer, alemtuzumab (CAMPATH™) for chronic lymphocytic leukemia, ofatumumab (ARZERRA™) for chronic lymphocytic leukemia, gemtuzumab ozogamicin (MYLOTARG™) for acute myelogenous leukemia.

[0613] Antibodies suitable for use in the methods disclosed herein can also target molecules expressed by immune cells, such as, but not limited to, 0X86 which targets OX40 and increases antigen-specific CD8+ T cells at tumor sites and enhances tumor rejection; BMS-663513 which targets CD137 and causes regression of established tumors, as well as the expansion and maintenance of CD8+ T cells, and daclizumab (ZENAPAX™) which targets CD25 and causes transient depletion of CD4+CD25+FOXP3+Tregs and enhances tumor regression and increases the number of effector T cells. A more detailed discussion of these antibodies can be found in, e.g., Weiner et al., Nature Rev. Immunol 2010; 10:317-27.

[0614] Other therapeutic antibodies can be identified that target tumor antigens (e.g., tumor antigens associated with different types of cancers, such as carcinomas, sarcomas, myelomas, leukemias, lymphomas, and combinations thereof). For example, the following tumor antigens can be targeted by therapeutic antibodies in the methods disclosed herein.

[0615] The tumor antigen may be an epithelial cancer antigen, (e.g., breast, gastrointestinal, lung), a prostate specific cancer antigen (PSA) or prostate specific membrane antigen (PSMA), a bladder cancer antigen, a lung (e.g., small cell lung) cancer antigen, a colon cancer antigen, an ovarian cancer antigen, a brain cancer antigen, a gastric cancer antigen, a renal cell carcinoma antigen, a pancreatic cancer antigen, a liver cancer antigen, an esophageal cancer antigen, a head and neck cancer antigen, or a colorectal cancer antigen. In certain embodiments, the tumor antigen is a lymphoma antigen (e.g., non-Hodgkin's lymphoma or Hodgkin's lymphoma), a B-cell lymphoma cancer antigen, a leukemia antigen, a myeloma (e.g., multiple myeloma or plasma cell myeloma) antigen, an acute lymphoblastic leukemia antigen, a chronic myeloid leukemia antigen, or an acute myelogenous leukemia antigen. It should be understood that the described tumor antigens are only exemplary and that any tumor antigen can be targeted for use in the methods disclosed herein.

[0616] In certain embodiments, the tumor antigen is a mucin-1 protein or peptide (MUC-1) that is found on most or all human adenocarcinomas: pancreas, colon, breast, ovarian, lung, prostate, head and neck, including multiple myelomas and some B cell lymphomas. Patients with inflammatory bowel disease, either Crohn's disease or ulcerative colitis, are at an increased risk for developing colorectal carcinoma. MUC-1 is a type I transmembrane glycoprotein. The major extracellular portion of MUC-1 has a large number of tandem repeats consisting of 20 amino acids which comprise immunogenic epitopes. In some cancers it is exposed in an unglycosylated form that is recognized by the immune system (Gendler et al., J Biol Chem 1990; 265:15286-15293).

[0617] In certain embodiments, the tumor antigen is a mutated B-Raf antigen, which is associated with melanoma and colon cancer. The vast majority of these mutations represent a single nucleotide change of T-A at nucleotide 1796 resulting in a valine to glutamic acid change at residue 599 within the activation segment of B-Raf. Raf proteins are also indirectly associated with cancer as effectors of activated Ras proteins, oncogenic forms of which are present in approximately one-third of all human cancers. Normal non-mutated B-Raf is involved in cell signaling, relaying signals from the cell membrane to the nucleus. The protein is usually only active when needed to relay signals. In contrast, mutant B-Raf has been reported to be constantly active, disrupting the signaling relay (Mercer and Pritchard, Biochim Biophys Acta (2003) 1653(1):25-40; Sharkey et al., Cancer Res. (2004) 64(5):1595-1599).

[0618] In certain embodiments, the tumor antigen is a human epidermal growth factor receptor-2 (HER-2/neu) antigen. Cancers that have cells that overexpress HER-2/neu are referred to as HER-2/neu⁺ cancers. Exemplary HER-2/neu⁺ cancers include prostate cancer, lung cancer, breast cancer, ovarian cancer, pancreatic cancer, skin cancer, liver cancer (e.g., hepatocellular adenocarcinoma), intestinal cancer, and bladder cancer.

[0619] HER-2/neu has an extracellular binding domain (ECD) of approximately 645 aa, with 40% homology to epidermal growth factor receptor (EGFR), a highly hydrophobic transmembrane anchor domain (TMD), and a carboxyterminal intracellular domain (ICD) of approximately 580 aa with 80% homology to EGFR. The nucleotide sequence of HER-2/neu is available at GENBANK™. Accession Nos. AH002823 (human HER-2 gene, promoter region and exon 1); M16792 (human HER-2 gene, exon 4): M16791 (human HER-2 gene, exon 3); M16790 (human HER-2 gene, exon 2); and M16789 (human HER-2 gene, promoter region and exon 1). The amino acid sequence for the HER-2/neu protein is available at GENBANK™ Accession No. AAA58637. Based on these sequences, one skilled in the art could develop HER-2/neu antigens using known assays to find appropriate epitopes that generate an effective immune response. Exemplary HER-2/neu antigens include p369-377 (a HER-2/neu derived HLA-A2 peptide); dHER2 (Corixa Corporation); li-Key MHC class II epitope hybrid (Generex Biotechnology Corporation); peptide P4 (amino acids 378-398); peptide P7 (amino acids 610-623); mixture of peptides P6 (amino acids 544-560) and P7; mixture of peptides P4, P6 and P7; HER2 [9₇₅₄]; and the like.

[0620] In certain embodiments, the tumor antigen is an epidermal growth factor receptor (EGFR) antigen. The EGFR antigen can be an EGFR variant 1 antigen, an EGFR variant 2 antigen, an EGFR variant 3 antigen and/or an EGFR variant 4 antigen. Cancers with cells that overexpress EGFR are referred to as EGFR⁺ cancers. Exemplary EGFR⁺ cancers include lung cancer, head and neck cancer, colon cancer, colorectal cancer, breast cancer, prostate cancer, gastric cancer, ovarian cancer, brain cancer and bladder cancer.

[0621] In certain embodiments, the tumor antigen is a vascular endothelial growth factor receptor (VEGFR) antigen. VEGFR is considered to be a regulator of cancer-induced angiogenesis. Cancers with cells that overexpress VEGFR are called VEGFR⁺ cancers. Exemplary VEGFR⁺ cancers include breast cancer, lung cancer, small cell lung cancer, colon cancer, colorectal cancer, renal cancer, leukemia, and lymphocytic leukemia.

[0622] In certain embodiments, the tumor antigen is prostate-specific antigen (PSA) and/or prostate-specific membrane antigen (PSMA) that are prevalently expressed in androgen-independent prostate cancers.

[0623] In certain embodiments, the tumor antigen is Glycoprotein 100 (gp 100), a tumor-specific antigen associated with melanoma.

[0624] In certain embodiments, the tumor antigen is a carcinoembryonic (CEA) antigen. Cancers with cells that overexpress CEA are referred to as CEA⁺ cancers. Exemplary CEA⁺ cancers include colorectal cancer, gastric cancer and pancreatic cancer. Exemplary CEA antigens include CAP-1 (i.e., CEA aa 571-579), CAP1-6D, CAP-2 (i.e., CEA aa 555-579), CAP-3 (i.e., CEA aa 87-89), CAP-4 (CEA aa 1-11), CAP-5 (i.e., CEA aa 345-354), CAP-6 (i.e., CEA aa 19-28) and CAP-7.

[0625] In certain embodiments, the tumor antigen is carbohydrate antigen 10.9 (CA 19.9). CA 19.9 is an oligosaccharide related to the Lewis A blood group substance and is associated with colorectal cancers.

[0626] In certain embodiments, the tumor antigen is a melanoma cancer antigen. Melanoma cancer antigens are useful for treating melanoma. Exemplary melanoma cancer antigens include MART-1 (e.g., MART-1 26-35 peptide, MART-1 27-35 peptide); MART-1/Melan A; pMel17; pMel17/gp100; gp100 (e.g., gp 100 peptide 280-288, gp 100 peptide 154-162, gp 100 peptide 457-467); TRP-1; TRP-2; NY-ESO-1; p16; beta-catenin; mum-1; and the like.

[0627] In certain embodiments, the tumor antigen is a mutant or wild type ras peptide. The mutant ras peptide can be a mutant K-ras peptide, a mutant N-ras peptide and/or a mutant H-ras peptide. Mutations in the ras protein typically occur at positions 12 (e.g., arginine or valine substituted for glycine), 13 (e.g., asparagine for glycine), 61 (e.g., glutamine to leucine) and/or 59. Mutant ras peptides can be useful as lung cancer antigens, gastrointestinal cancer antigens, hepatoma antigens, myeloid cancer antigens (e.g., acute leukemia, myelodysplasia), skin cancer antigens (e.g., melanoma, basal cell, squamous cell), bladder cancer antigens, colon cancer antigens, colorectal cancer antigens, and renal cell cancer antigens.

[0628] In certain embodiments, the tumor antigen is a mutant and/or wildtype p53 peptide. The p53 peptide can be used as colon cancer antigens, lung cancer antigens, breast cancer antigens, hepatocellular carcinoma cancer antigens, lymphoma cancer antigens, prostate cancer antigens, thyroid cancer antigens, bladder cancer antigens, pancreatic cancer antigens and ovarian cancer antigens.

[0629] Further tumor antigens are well known in the art and include, for example, a glioma-associated antigen, carcinoembryonic antigen (CEA), β-human chorionic gonadotropin, alphafetoprotein (AFP), lectin-reactive AFP, thyroglobulm, RAGE-1, MN-CA IX, human telomerase reverse transcriptase, RU1, RU2 (AS), intestinal carboxy esterase, mut hsp70-2, M-CSF, prostase, prostate-specific antigen (PSA), PAP, NY-ESO-1, LAGE-1a, p53, tyrosinase, prostein, PSMA, ras, Her2/neu, TRP-1, TRP-2, TAG-72, KSA, CA-125, PSA, BRCI, BRC-II, bcr-abl, pax3-fkhr, ews-fli-1, survivin and telomerase, prostate-carcinoma tumor antigen-1 (PCTA-1), MAGE, GAGE, GP-100, MUC-1, MUC-2, ELF2M, neutrophil elastase, ephrinB2, CD22, insulin growth factor (IGF)-I, IGF-II, IGF-I receptor, and mesothelin,

[0630] In certain embodiments, the tumor antigen comprises one or more antigenic cancer epitopes associated with a malignant tumor. Malignant tumors express a number of proteins that can serve as target antigens for an immune attack. These molecules include but are not limited to tissue-specific antigens such as MART-1, tyrosinase and GP 100 in melanoma and prostatic acid phosphatase (PAP) and prostate-specific antigen (PSA) in prostate cancer. Other target molecules belong to the group of transformation-related molecules such as the oncogene HER-2/Neu ErbB-2. Yet another group of target antigens are onco-fetal antigens such as carcinoembryonic antigen (CEA). In B-cell lymphoma the tumor-specific idiotype immunoglobulin constitutes a truly tumor-specific immunoglobulin antigen that is unique to the individual tumor. B-cell differentiation antigens such as CD19, CD20 and CD37 are other candidates for target antigens in B-cell lymphoma. Some of these antigens (CEA, HER-2, CD19, CD20, idiotype) have been used as targets for passive immunotherapy with monoclonal antibodies with limited success.

[0631] The tumor antigen may also be a tumor-specific antigen (TSA) or a tumor-associated antigen (TAA). A TSA is unique to tumor cells and does not occur on other cells in the body. A TAA associated antigen is not unique to a tumor cell and instead is also expressed on a normal cell under conditions that fail to induce a state of immunologic tolerance to the antigen. The expression of the antigen on the tumor may occur under conditions that enable the immune system to respond to the antigen. TAAs may be antigens that are expressed on normal cells during fetal development when the immune system is immature and unable to respond or they may be antigens that are normally present at extremely low levels on normal cells but which are expressed at much higher levels on tumor cells.

[0632] Non-limiting examples of TSA or TAA antigens include the following: Differentiation antigens such as MART-1/MelanA (MART-1), Pmel 17, tyrosinase, TRP-1, TRP-2 and tumor-specific multilineage antigens such as MAGE-1, MAGE-3, BAGE, GAGE-1, GAGE-2, pi 5; overexpressed embryonic antigens such as CEA; overexpressed oncogenes and mutated tumor-suppressor genes such as p53, Ras, HER-2/neu; unique tumor antigens resulting from chromosomal translocations such as BCR-ABL, E2A-PRL, H4-RET, 1GH-IGK, MYL-RAR; and viral antigens, such as the Epstein Barr virus antigens EBVA and the human papillomavirus (HPV) antigens E6 and E7. Other large, protein-based antigens include TSP-180, MAGE-4, MAGE-5, MAGE-6, RAGE, NY-ESO, p185erbB2, p180erbB-3, c-met, nm-23H1, PSA, TAG-72, CA 19-9, CA 72-4, CAM 17.1, NuMa, K-ras, beta-Catenin, CDK4, Mum-1, p 15, p 16, 43-9F, 5T4(791Tgp72} alpha-fetoprotem, beta-HCG, BCA225, BTAA, CA 125, CA 15-3\CA 27.29\BCAA, CA 195, CA 242, CA-50, CAM43, CD68\I, CO-029, FGF-5, G250, Ga733VEpCAM, HTgp-175, M344, MA-50, MG7-Ag, MOV 18, NB/70K, NY-CO-1, RCAS 1, SDCCAG16, TA-90\Mac-2 binding protein, Acyclophilin C-associated protein, TAAL6, TAG72, TLP, and TPS.

[0633] In certain embodiments, the tumor-associated antigen is determined by sequencing a patient's tumor cells and identifying mutated proteins only found in the tumor. These antigens are referred to as “neoantigens.” Once a neoantigen has been identified, therapeutic antibodies can be produced against it and used in the methods described herein.

[0634] The therapeutic antibody can be a fragment of an antibody; a complex comprising an antibody; or a conjugate comprising an antibody. The antibody can optionally be chimeric or humanized or fully human.

### III. Immune Checkpoint Blockade

[0635] In some aspects, the disclosure provides immunomodulatory fusion proteins to be used or performed in conjunction with immune checkpoint inhibitors or immune checkpoint blockers.

[0636] T cell activation and effector functions are balanced by co-stimulatory and inhibitory signals, referred to as “immune checkpoints.” Inhibitory ligands and receptors that regulate T cell effector functions are overexpressed on tumor cells. Subsequently, agonists of co-stimulatory receptors or antagonists of inhibitory signals, result in the amplification of antigen-specific T cell responses. In contrast to therapeutic antibodies which target tumor cells directly, immune checkpoint blocker enhances endogenous anti-tumor activity. In certain embodiments, the immune checkpoint blocker suitable for use in the methods disclosed herein, is an antagonist of inhibitory signals, e.g., an antibody which targets, for example, PD-1, PD-L1, CTLA-4, LAG3, B7-H3, B7-H4, or TIM3. These ligands and receptors are reviewed in Pardoll, D., Nature. 12: 252-264, 2012.

[0637] In certain embodiments, the immune checkpoint blocker is an antibody or an antigen-binding portion thereof, that disrupts or inhibits signaling from an inhibitory immunoregulator. In certain embodiments, the immune checkpoint blocker is a small molecule that disrupts or inhibits signaling from an inhibitory immunoregulator.

[0638] In certain embodiments, the inhibitory immunoregulator (immune checkpoint blocker) is a component of the PD-1/PD-L1 signaling pathway. Accordingly, certain embodiments of the disclosure provide methods for immunotherapy of a subject afflicted with cancer, which methods comprise administering to the subject a therapeutically effective amount of an antibody or an antigen-binding portion thereof that disrupts the interaction between the PD-1 receptor and its ligand, PD-L1. Antibodies known in the art which bind to PD-1 and disrupt the interaction between the PD-1 and its ligand, PD-L1, and stimulates an anti-tumor immune response, are suitable for use in the methods disclosed herein. In certain embodiments, the antibody or antigen-binding portion thereof binds specifically to PD-1. For example, antibodies that target PD-1 and are in clinical trials include, e.g., nivolumab (BMS-936558, Bristol-Myers Squibb) and pembrolizumab (lambrolizumab, MK03475, Merck). Other suitable antibodies for use in the methods disclosed herein are anti-PD-1 antibodies disclosed in U.S. Pat. No. 8,008,449, herein incorporated by reference. In certain embodiments, the antibody or antigen-binding portion thereof binds specifically to PD-L1 and inhibits its interaction with PD-1, thereby increasing immune activity. Antibodies known in the art which bind to PD-L1 and disrupt the interaction between the PD-1 and PD-L1, and stimulates an anti-tumor immune response, are suitable for use in the methods disclosed herein. For example, antibodies that target PD-L1 and are in clinical trials, include BMS-936559 (Bristol-Myers Squibb) and MPDL3280A (Genetech). Other suitable antibodies that target PD-L1 are disclosed in U.S. Pat. No. 7,943,743. It will be understood by one of ordinary skill that any antibody which binds to PD-1 or PD-L1, disrupts the PD-1/PD-L1 interaction, and stimulates an anti-tumor immune response, is suitable for use in the methods disclosed herein.

[0639] In certain embodiments, the inhibitory immunoregulator is a component of the CTLA-4 signaling pathway. Accordingly, certain embodiments of the disclosure provide methods for immunotherapy of a subject afflicted with cancer, which methods comprise administering to the subject a therapeutically effective amount of an antibody or an antigen-binding portion thereof that targets CTLA-4 and disrupts its interaction with CD80 and CD86. Exemplary antibodies that target CTLA-4 include ipilimumab (MDX-010, MDX-101, Bristol-Myers Squibb), which is FDA approved, and tremelimumab (ticilimumab, CP-675, 206, Pfizer), currently undergoing human trials. Other suitable antibodies that target CTLA-4 are disclosed in WO 2012/120125, U.S. Pat. Nos. 6,984,720, 6,682,7368, and U.S. Patent Applications 2002/0039581, 2002/0086014, and 2005/0201994, herein incorporated by reference. It will be understood by one of ordinary skill that any antibody which binds to CTLA-4, disrupts its interaction with CD80 and CD86, and stimulates an anti-tumor immune response, is suitable for use in the methods disclosed herein.

[0640] In certain embodiments, the inhibitory immunoregulator is a component of the LAG3 (lymphocyte activation gene 3) signaling pathway. Accordingly, certain embodiments of the disclosure provide methods for immunotherapy of a subject afflicted with cancer, which methods comprise administering to the subject a therapeutically effective amount of an antibody or an antigen-binding portion thereof that targets LAG3 and disrupts its interaction with MHC class II molecules. An exemplary antibody that targets LAG3 is IMP321 (Immutep), currently undergoing human trials. Other suitable antibodies that target LAG3 are disclosed in U.S. Patent Application 2011/0150892, herein incorporated by reference. It will be understood by one of ordinary skill that any antibody which binds to LAG3, disrupts its interaction with MHC class II molecules, and stimulates an anti-tumor immune response, is suitable for use in the methods disclosed herein.

[0641] In certain embodiments, the inhibitory immunoregulator is a component of the B7 family signaling pathway. In certain embodiments, the B7 family members are B7-H3 and B7-H4. Accordingly, certain embodiments of the disclosure provide methods for immunotherapy of a subject afflicted with cancer, which methods comprise administering to the subject a therapeutically effective amount of an antibody or an antigen-binding portion thereof that targets B7-H3 or H4. The B7 family does not have any defined receptors but these ligands are upregulated on tumor cells or tumor-infiltrating cells. Preclinical mouse models have shown that blockade of these ligands can enhance anti-tumor immunity. An exemplary antibody that targets B7-H3 is MGA271 (Macrogenics), currently undergoing human trials. Other suitable antibodies that target LAG3 are disclosed in U.S. Patent Application 2013/0149236, herein incorporated by reference. It will be understood by one of ordinary skill that any antibody which binds to B7-H3 or H4, and stimulates an anti-tumor immune response, is suitable for use in the methods disclosed herein.

[0642] In certain embodiments, the inhibitory immunoregulator is a component of the TIM3 (T cell membrane protein 3) signaling pathway. Accordingly, certain embodiments of the disclosure provide methods for immunotherapy of a subject afflicted with cancer, which methods comprise administering to the subject a therapeutically effective amount of an antibody or an antigen-binding portion thereof that targets LAG3 and disrupts its interaction with galectin 9. Suitable antibodies that target TIM3 are disclosed in U.S. Patent Application 2013/0022623, herein incorporated by reference. It will be understood by one of ordinary skill that any antibody which binds to TIM3, disrupts its interaction with galectin 9, and stimulates an anti-tumor immune response, is suitable for use in the methods disclosed herein.

[0643] It should be understood that antibodies targeting immune checkpoints suitable for use in the methods disclosed herein are not limited to those described supra. Moreover, it will be understood by one of ordinary skill in the art that other immune checkpoint targets can also be targeted by antagonists or antibodies in the methods described herein, provided that the targeting results in the stimulation of an anti-tumor immune response as reflected in, e.g., an increase in T cell proliferation, enhanced T cell activation, and/or increased cytokine production (e.g., IFN-γ, IL-2).

### IV. Cancer Vaccine

[0644] In some aspects, the disclosure provides immunomodulatory fusion proteins to be used or performed in conjunction with a cancer vaccine. In certain embodiments, the cancer vaccine stimulates a specific immune response against a specific target, such as a tumor-associated antigen.

[0645] In certain embodiments, the cancer vaccine includes viral, bacterial or yeast vectors to deliver recombinant genes to antigen presenting cells (APCs).

[0646] In certain embodiments the cancer vaccine uses autologous or allogeneic tumor cells. In certain embodiments, these tumor cells may be modified for expression of MHC, costimulatory molecules, or cytokines.

[0647] In certain embodiments, the tumor-associated antigen is determined by sequencing a patient's tumor cells and identifying mutated proteins only found in the tumor. These antigens are referred to as “neoantigens.” Once a neoantigen has been identified, it can be used as the antigen for a vaccine or for developing monoclonal antibodies specifically reactive with the neoantigen.

[0648] In certain embodiments, the vaccine includes irradiated tumor cells transduced with cytokines such as GM-CSF or loaded with adjuvant compounds, such as the GM-CSF-secreting tumor cell vaccine GVAX (Immunological Reviews, 222(1): 287-298, 2008). In certain embodiments the vaccine includes one or more tumor-associated antigens in the form of an immunogenic composition, optionally in combination with an adjuvant. For example, vaccination against HPV-16 oncoproteins resulted in positive clinical outcomes for vulvar intraepithelial neoplasia (The New England Journal of Medicine, 361(19), 1838-1847, 2012). Also, multipeptide immune response to cancer vaccine IMA901 after single-dose cyclophosphamide associates with longer patient survival (Nature Medicine, 18(8): 1254-61, 2012). Alternatively, a DNA-based approach can be used to immunize a patient with one or more tumor-associated antigens. Improved tumor immunity is observed using a DNA vaccine in combination with an anti-tyrosinase related protein-1 monoclonal antibody in murine melanoma (Cancer Research, 68(23), 9884-9891, 2008).

[0649] Other vaccine approaches utilize patient immune cells, such as dendritic cells which can be cultured with a tumor-associated antigen to produce antigen presenting cells that will stimulate the immune system and target the antigen of interest. A current FDA approved cancer treatment vaccine using this approach is Provenge® (Dendreon), approved for use in some men with metastatic prostate cancer. This vaccine stimulates an immune response to prostatic acid phosphatase (PAP), an antigen found on most prostate cancer cells. The vaccine is created by isolating a specific patient's immune cells and culturing dendritic cells with PAP to produce antigen presenting cells that will stimulate the immune system and target PAP. These and other cancer vaccines can be used in combination with other treatments as described herein.

### A. Amphiphile Vaccines

[0650] In some embodiments, the cancer vaccine suitable for use with the immunomodulatory fusion proteins described herein is an amphiphile vaccine, as described in US 2013/0295129, herein incorporated by reference. An amphiphile vaccine combines an albumin-binding lipid and a peptide antigen or molecular adjuvant to efficiently target the peptide or adjuvant to lymph nodes in vivo. Lipid conjugates bind to endogenous albumin, which targets them to lymphatics and draining lymph nodes where they accumulate due to the filtering of albumin by antigen presenting cells. When the lipid conjugate includes an antigenic peptide or molecular adjuvant, the conjugates induce or enhance a robust immune response.

[0651] Lymph node-targeting conjugates typically include three domains: a highly lipophilic, albumin-binding domain (e.g., an albumin-binding lipid), a cargo such as a molecular adjuvant or a peptide antigen, and a polar block linker, which promotes solubility of the conjugate and reduces the ability of the lipid to insert into cellular plasma membranes. Accordingly, in certain embodiments, the general structure of the conjugate is L-P-C, where “L” is an albumin-binding lipid, “P” is a polar block, and “C” is a cargo such as a molecular adjuvant or a polypeptide. In some embodiments, the cargo itself can also serve as the polar block domain, and a separate polar block domain is not required. Therefore, in certain embodiments the conjugate has only two domains: an albumin-binding lipid and a cargo.

[0652] The cargo of the conjugates suitable for use in the methods disclosed herein is typically a molecular adjuvant such as an immunostimulatory oligonucleotide, or a peptide antigen. However, the cargo can also be other oligonucleotides, peptides, Toll-like receptor agonists or other immunomodulatory compounds, dyes, MRI contrast agents, fluorophores or small molecule drugs that require efficient trafficking to the lymph nodes.

[0653] In certain embodiments, a lipid-oligonucleotide conjugates includes an immunostimulatory oligonucleotide which is conjugated directly to a lipid, or is linked to a linker which is conjugated to a lipid. Other embodiments are directed to lipid-peptide conjugates which include an antigenic peptide conjugated directly to a lipid, or is linked to a linker which is conjugated to a lipid.

### Lipids

[0654] The lipid conjugates typically include a hydrophobic lipid. The lipid can be linear, branched, or cyclic. The lipid is preferably at least 17 to 18 carbons in length, but may be shorter if it shows good albumin binding and adequate targeting to the lymph nodes. Lymph node-targeting conjugates include lipid-oligonucleotide conjugates and lipid-peptide conjugates that can be trafficked from the site of delivery through the lymph to the lymph node. In certain embodiments, the activity relies, in-part, on the ability of the conjugate to associate with albumin in the blood of the subject. Therefore, lymph node-targeted conjugates typically include a lipid that can bind to albumin under physiological conditions. Lipids suitable for targeting the lymph node can be selected based on the ability of the lipid or a lipid conjugate including the lipid to bind to albumin. Suitable methods for testing the ability of the lipid or lipid conjugate to bind to albumin are known in the art.

[0655] For example, in certain embodiments, a plurality of lipid conjugates is allowed to spontaneously form micelles in aqueous solution. The micelles are incubated with albumin, or a solution including albumin such as Fetal Bovine Serum (FBS). Samples can be analyzed, for example, by ELISA, size exclusion chromatography or other methods to determine if binding has occurred. Lipid conjugates can be selected as lymph node-targeting conjugates if in the presence of albumin, or a solution including albumin such as Fetal Bovine Serum (FBS), the micelles dissociate and the lipid conjugates bind to albumin as discussed above.

[0656] Examples of preferred lipids for use in lymph node targeting lipid conjugates include, but are not limited to, fatty acids with aliphatic tails of 8-30 carbons including, but not limited to, linear unsaturated and saturated fatty acids, branched saturated and unsaturated fatty acids, and fatty acids derivatives, such as fatty acid esters, fatty acid amides, and fatty acid thioesters, diacyl lipids, cholesterol, cholesterol derivatives, and steroid acids such as bile acids, Lipid A or combinations thereof.

[0657] In certain embodiments, the lipid is a diacyl lipid or two-tailed lipid. In some embodiments, the tails in the diacyl lipid contain from about 8 to about 30 carbons and can be saturated, unsaturated, or combinations thereof. The tails can be coupled to the head group via ester bond linkages, amide bond linkages, thioester bond linkages, or combinations thereof. In a particular embodiment, the diacyl lipids are phosphate lipids, glycolipids, sphingolipids, or combinations thereof.

[0658] Preferably, lymph node-targeting conjugates include a lipid that is 8 or more carbon units in length. It is believed that increasing the number of lipid units can reduce insertion of the lipid into plasma membrane of cells, allowing the lipid conjugate to remain free to bind albumin and traffic to the lymph node.

[0659] For example, the lipid can be a diacyl lipid composed of two C18 hydrocarbon tails. In certain embodiments, the lipid for use in preparing lymph node targeting lipid conjugates is not a single chain hydrocarbon (e.g., C18), or cholesterol. Cholesterol conjugation has been explored to enhance the immunomodulation of molecular adjuvants such as CpG and immunogenicity of peptides, but cholesterol conjugates, which associate well with lipoproteins but poorly with albumin, show poor lymph node targeting and low immunogenicity in vaccines compared to optimal albumin-binding conjugates.

### Molecular Adjuvants

[0660] In certain embodiments, lipid-oligonucleotide conjugates are used in the vaccine. The oligonucleotide conjugates typically contain an immunostimulatory oligonucleotide.

[0661] In certain embodiments, the immunostimulatory oligonucleotide can serve as a ligand for pattern recognition receptors (PRRs). Examples of PRRs include the Toll-like family of signaling molecules that play a role in the initiation of innate immune responses and also influence the later and more antigen specific adaptive immune responses. Therefore, the oligonucleotide can serve as a ligand for a Toll-like family signaling molecule, such as Toll-Like Receptor 9 (TLR9).

[0662] For example, unmethylated CpG sites can be detected by TLR9 on plasmacytoid dendritic cells and B cells in humans (Zaida, et al., Infection and Immunity, 76(5):2123-2129, (2008)). Therefore, the sequence of oligonucleotide can include one or more unmethylated cytosine-guanine (CG or CpG, used interchangeably) dinucleotide motifs. The ‘p’ refers to the phosphodiester backbone of DNA, as discussed in more detail below, some oligonucleotides including CG can have a modified backbone, for example a phosphorothioate (PS) backbone. In certain embodiments, an immunostimulatory oligonucleotide can contain more than one CG dinucleotide, arranged either contiguously or separated by intervening nucleotide(s). The CpG motif(s) can be in the interior of the oligonucleotide sequence. Numerous nucleotide sequences stimulate TLR9 with variations in the number and location of CG dinucleotide(s), as well as the precise base sequences flanking the CG dimers.

[0663] Typically, CG ODNs are classified based on their sequence, secondary structures, and effect on human peripheral blood mononuclear cells (PBMCs). The five classes are Class A (Type D), Class B (Type K), Class C, Class P, and Class S (Vollmer, J & Krieg, A M, Advanced drug delivery reviews 61(3): 195-204 (2009), incorporated herein by reference). CG ODNs can stimulate the production of Type I interferons (e.g., IFNα) and induce the maturation of dendritic cells (DCs). Some classes of ODNs are also strong activators of natural killer (NK) cells through indirect cytokine signaling. Some classes are strong stimulators of human B cell and monocyte maturation (Weiner, G L, PNAS USA 94(20): 10833-7 (1997); Dalpke, A H, Immunology 106(1): 102-12 (2002); Hartmann, G, J of Immun. 164(3):1617-2 (2000), each of which is incorporated herein by reference).

[0664] According to some embodiments, a lipophilic-CpG oligonucleotide conjugate is used to enhance an immune response to a peptide antigen. The lipophilic-CpG oligonucleotide is represented by the following, wherein “L” is a lipophilic compound, such as diacyl lipid, “Gn” is a guanine repeat linker and “n” represents 1, 2, 3, 4, or 5.

(SEQ ID NO: 205)
5′-L-GₙTCCATGACGTTCCTGACGTT-3′

[0665] Other PRR Toll-like receptors include TLR3, and TLR7 which may recognize double-stranded RNA, single-stranded and short double-stranded RNAs, respectively, and retinoic acid-inducible gene I (RIG-I)-like receptors, namely RIG-I and melanoma differentiation-associated gene 5 (MDA5), which are best known as RNA-sensing receptors in the cytosol. Therefore, in certain embodiments, the oligonucleotide contains a functional ligand for TLR3, TLR7, or RIG-I-like receptors, or combinations thereof.

[0666] Examples of immunostimulatory oligonucleotides, and methods of making them are known in the art, see for example, Bodera, P. Recent Pat Inflamm Allergy Drug Discov. 5(1):87-93 (2011), incorporated herein by reference.

[0667] In certain embodiments, the oligonucleotide cargo includes two or more immunostimulatory sequences.

[0668] The oligonucleotide can be between 2-100 nucleotide bases in length, including for example, 5 nucleotide bases in length, 10 nucleotide bases in length, 15 nucleotide bases in length, 20 nucleotide bases in length, 25 nucleotide bases in length, 30 nucleotide bases in length, 35 nucleotide bases in length, 40 nucleotide bases in length, 45 nucleotide bases in length, 50 nucleotide bases in length, 60 nucleotide bases in length, 70 nucleotide bases in length, 80 nucleotide bases in length, 90 nucleotide bases in length, 95 nucleotide bases in length, 98 nucleotide bases in length, 100 nucleotide bases in length or more.

[0669] The 3′ end or the 5′ end of the oligonucleotides can be conjugated to the polar block or the lipid. In certain embodiments the 5′ end of the oligonucleotide is linked to the polar block or the lipid.

[0670] The oligonucleotides can be DNA or RNA nucleotides which typically include a heterocyclic base (nucleic acid base), a sugar moiety attached to the heterocyclic base, and a phosphate moiety which esterifies a hydroxyl function of the sugar moiety. The principal naturally-occurring nucleotides comprise uracil, thymine, cytosine, adenine and guanine as the heterocyclic bases, and ribose or deoxyribose sugar linked by phosphodiester bonds. In certain embodiments, the oligonucleotides are composed of nucleotide analogs that have been chemically modified to improve stability, half-life, or specificity or affinity for a target receptor, relative to a DNA or RNA counterpart. The chemical modifications include chemical modification of nucleobases, sugar moieties, nucleotide linkages, or combinations thereof. As used herein ‘modified nucleotide” or “chemically modified nucleotide” defines a nucleotide that has a chemical modification of one or more of the heterocyclic base, sugar moiety or phosphate moiety constituents. In certain embodiments, the charge of the modified nucleotide is reduced compared to DNA or RNA oligonucleotides of the same nucleobase sequence. For example, the oligonucleotide can have low negative charge, no charge, or positive charge.

[0671] Typically, nucleoside analogs support bases capable of hydrogen bonding by Watson-Crick base pairing to standard polynucleotide bases, where the analog backbone presents the bases in a manner to permit such hydrogen bonding in a sequence-specific fashion between the oligonucleotide analog molecule and bases in a standard polynucleotide (e.g., single-stranded RNA or single-stranded DNA). In certain embodiments, the analogs have a substantially uncharged, phosphorus containing backbone.

### Peptide Antigens

[0672] The peptide conjugates suitable for use in the methods disclosed herein typically include an antigenic protein or polypeptide, such as a tumor-associated antigen or portion thereof.

[0673] The peptide can be 2-100 amino acids, including for example, 5 amino acids, 10 amino acids, 15 amino acids, 20 amino acids, 25 amino acids, 30 amino acids, 35 amino acids, 40 amino acids, 45 amino acids, or 50 amino acids. In some embodiments, a peptide can be greater than 50 amino acids. In some embodiments, the peptide can be >100 amino acids. A protein/peptide can be linear, branched or cyclic. The peptide can include D amino acids, L amino acids, or a combination thereof. The peptide or protein can be conjugated to the polar block or lipid at the N-terminus or the C-terminus of the peptide or protein.

[0674] The protein or polypeptide can be any protein or peptide that can induce or increase the ability of the immune system to develop antibodies and T-cell responses to the protein or peptide. A cancer antigen is an antigen that is typically expressed preferentially by cancer cells (i.e., it is expressed at higher levels in cancer cells than on non-cancer cells) and in some instances it is expressed solely by cancer cells. The cancer antigen may be expressed within a cancer cell or on the surface of the cancer cell. The cancer antigen can be, but is not limited to, TRP-1, TRP-2, MART-1/Melan-A, gp100, adenosine deaminase-binding protein (ADAbp), FAP, cyclophilin b, colorectal associated antigen (CRC)-C017-1A/GA733, carcinoembryonic antigen (CEA), CAP-1, CAP-2, etv6, AML1, prostate specific antigen (PSA), PSA-1, PSA-2, PSA-3, prostate-specific membrane antigen (PSMA), T cell receptor/CD3-zeta chain, and CD20. The cancer antigen may be selected from the group consisting of MAGE-A1, MAGE-A2, MAGE-A3, MAGE-A4, MAGE-A5, MAGE-A6, MAGE-A7, MAGE-A8, MAGE-A9, MAGE-A10, MAGE-A11, MAGE-A12, MAGE-Xp2 (MAGE-B2), MAGE-Xp3 (MAGE-B3), MAGE-Xp4 (MAGE-B4), MAGE-C1, MAGE-C2, MAGE-C3, MAGE-C4, MAGE-05), GAGE-1, GAGE-2, GAGE-3, GAGE-4, GAGE-5, GAGE-6, GAGE-7, GAGE-8, GAGE-9, BAGE, RAGE, LAGE-1, NAG, GnT-V, MUM-1, CDK4, tyrosinase, p53, MUC family, HER2/neu, p21ras, RCAS1, α-fetoprotein, E-cadherin, α-catenin, β-catenin, γ-catenin, p120ctn, gp100Pmel 17, PRAME, NY-ESO-1, cdc27, adenomatous polyposis coli protein (APC), fodrin, Connexin 37, Ig-idiotype, p15, gp75, GM2 ganglioside, GD2 ganglioside, human papilloma virus proteins, Smad family of tumor antigens, Imp-1, P1A, EBV-encoded nuclear antigen (EBNA)-1, brain glycogen phosphorylase, SSX-1, SSX-2 (HOM-MEL-40), SSX-1, SSX-4, SSX-5, SCP-1 and CT-7, CD20, or c-erbB-2. Additional cancer antigens include the tumor antigens described herein.

[0675] Suitable antigens are known in the art and are available from commercial government and scientific sources. In certain embodiments, the antigens are whole inactivated or irradiated tumor cells. The antigens may be purified or partially purified polypeptides derived from tumors. The antigens can be recombinant polypeptides produced by expressing DNA encoding the polypeptide antigen in a heterologous expression system. The antigens can be DNA encoding all or part of an antigenic protein. The DNA may be in the form of vector DNA such as plasmid DNA.

[0676] In certain embodiments, antigens may be provided as single antigens or may be provided in combination. Antigens may also be provided as complex mixtures of polypeptides or nucleic acids.

### Polar Block/Linker

[0677] For the conjugate to be trafficked efficiently to the lymph node, the conjugate should remain soluble. Therefore, a polar block linker can be included between the cargo and the lipid to increase solubility of the conjugate. The polar block reduces or prevents the ability of the lipid to insert into the plasma membrane of cells, such as cells in the tissue adjacent to the injection site. The polar block can also reduce or prevent the ability of cargo, such as synthetic oligonucleotides containing a PS backbone, from non-specifically associating with extracellular matrix proteins at the site of administration. The polar block increases the solubility of the conjugate without preventing its ability to bind to albumin. It is believed that this combination of characteristics allows the conjugate to bind to albumin present in the serum or interstitial fluid, and remain in circulation until the albumin is trafficked to, and retained in a lymph node. The length and composition of the polar block can be adjusted based on the lipid and cargo selected. For example, for oligonucleotide conjugates, the oligonucleotide itself may be polar enough to insure solubility of the conjugate, for example, oligonucleotides that are 10, 15, 20 or more nucleotides in length. Therefore, in certain embodiments, no additional polar block linker is required. However, depending on the amino acid sequence, some lipidated peptides can be essentially insoluble. In these cases, it can be desirable to include a polar block that mimics the effect of a polar oligonucleotide.

[0678] A polar block can be used as part of any of lipid conjugates suitable for use in the methods disclosed herein, for example, lipid-oligonucleotide conjugates and lipid-peptide conjugates, which reduce cell membrane insertion/preferential portioning ont albumin. Suitable polar blocks include, but are not limited to, oligonucleotides such as those discussed above, a hydrophilic polymer including but not limited to poly(ethylene glycol) (MW: 500 Da to 20,000 Da), polyacrylamide (MW: 500 Da to 20,000 Da), polyacrylic acid; a string of hydrophilic amino acids such as serine, threonine, cysteine, tyrosine, asparagine, glutamine, aspartic acid, glutamic acid, lysine, arginine, histidine, or combinations thereof polysaccharides, including but not limited to, dextran (MW: 1,000 Da to 2,000,000 Da), or combinations thereof.

[0679] The hydrophobic lipid and the linker/cargo are covalently linked. The covalent bond may be a non-cleavable linkage or a cleavable linkage. The non-cleavable linkage can include an amide bond or phosphate bond, and the cleavable linkage can include a disulfide bond, acid-cleavable linkage, ester bond, anhydride bond, biodegradable bond, or enzyme-cleavable linkage.

[0680] a. Ethylene Glycol Linkers

[0681] In certain embodiments, the polar block is one or more ethylene glycol (EG) units, more preferably two or more EG units (i.e., polyethylene glycol (PEG)). For example, in certain embodiments, a peptide conjugate includes a protein or peptide (e.g., peptide antigen) and a hydrophobic lipid linked by a polyethylene glycol (PEG) molecule or a derivative or analog thereof.

[0682] In certain embodiments, protein conjugates suitable for use in the methods disclosed herein contain protein antigen linked to PEG which is in turn linked to a hydrophobic lipid, or lipid-Gn-ON conjugates, either covalently or via formation of protein-oligo conjugates that hybridize to oligo micelles. The precise number of EG units depends on the lipid and the cargo, however, typically, a polar block can have between about 1 and about 100, between about 20 and about 80, between about 30 and about 70, or between about 40 and about 60 EG units. In certain embodiments, the polar block has between about 45 and 55 EG, units. For example, in certain embodiments, the polar block has 48 EG units.

[0683] b. Oligonucleotide Linkers

[0684] As discussed above, in certain embodiments, the polar block is an oligonucleotide. The polar block linker can have any sequence, for example, the sequence of the oligonucleotide can be a random sequence, or a sequence specifically chosen for its molecular or biochemical properties (e.g., highly polar). In certain embodiments, the polar block linker includes one or more series of consecutive adenine (A), cytosine (C), guanine (G), thymine (T), uracil (U), or analog thereof. In certain embodiments, the polar block linker consists of a series of consecutive adenine (A), cytosine (C), guanine (G), thymine (T), uracil (U), or analog thereof.

[0685] In certain embodiments, the linker is one or more guanines, for example between 1-10 guanines. It has been discovered that altering the number of guanines between a cargo such as a CpG oligonucleotide, and a lipid tail controls micelle stability in the presence of serum proteins. Therefore, the number of guanines in the linker can be selected based on the desired affinity of the conjugate for serum proteins such as albumin. When the cargo is a CpG immunostimulatory oligonucleotide and the lipid tail is a diacyl lipid, the number of guanines affects the ability of micelles formed in aqueous solution to dissociate in the presence of serum: 20% of the non-stabilized micelles (lipo-G₀T₁₀-CG)(SEQ ID NO: 206) were intact, while the remaining 80% were disrupted and bonded with FBS components. In the presence of guanines, the percentage of intact micelles increased from 36% (lipo-G₂T₈-CG) (SEQ ID NO: 207) to 73% (lipo-G₄T₆-CG) (SEQ ID NO: 208), and finally reached 90% (lipo-G₆T₄-CG) (SEQ ID NO: 209). Increasing the number of guanines to eight (lipo-G₈T₂-CG) (SEQ ID NO: 210) and ten (lipo-G₁₀T₀-CG) (SEQ ID NO: 211) did not further enhance micelle stability.

[0686] Therefore, in certain embodiments, the linker in a lymph node-targeting conjugate suitable for use in the methods disclosed herein can include 0, 1, or 2 guanines. As discussed in more detail below, linkers that include 3 or more consecutive guanines can be used to form micelle-stabilizing conjugates with properties that are suitable for use in the methods disclosed herein.

### B. Immunogenic Compositions

[0687] The conjugates suitable for use in the methods disclosed herein can be used in immunogenic compositions or as components in vaccines. Typically, immunogenic compositions disclosed herein include an adjuvant, an antigen, or a combination thereof. The combination of an adjuvant and an antigen can be referred to as a vaccine. When administered to a subject in combination, the adjuvant and antigen can be administered in separate pharmaceutical compositions, or they can be administered together in the same pharmaceutical composition. When administered in combination, the adjuvant can be a lipid conjugate, the antigen can be a lipid conjugate, or the adjuvant and the antigen can both be lipid conjugates.

[0688] An immunogenic composition suitable for use in the methods disclosed herein can include a lipid conjugate that is an antigen such as an antigenic polypeptide-lipid conjugate, administered alone, or in combination with an adjuvant. The adjuvant may be without limitation alum (e.g., aluminum hydroxide, aluminum phosphate); saponins purified from the bark of the Q. saponaria tree such as QS21 (a glycolipid that elutes in the 21st peak with HPLC fractionation; Antigenics, Inc., Worcester, Mass.); poly[di(carboxylatophenoxy)phosphazene (PCPP polymer; Virus Research Institute, USA), Flt3 ligand, Leishmania elongation factor (a purified Leishmania protein; Corixa Corporation, Seattle, Wash.), ISCOMS (immunostimulating complexes which contain mixed saponins, lipids and form virus-sized particles with pores that can hold antigen; CSL, Melbourne, Australia), Pam3Cys, SB-AS4 (SmithKline Beecham adjuvant system #4 which contains alum and MPL; SBB, Belgium), non-ionic block copolymers that form micelles such as CRL 1005 (these contain a linear chain of hydrophobic polyoxypropylene flanked by chains of polyoxyethylene, Vaxcel, Inc., Norcross, Ga.), and Montanide IMS (e.g., IMS 1312, water-based nanoparticles combined with a soluble immunostimulant, Seppic).

[0689] Adjuvants may be TLR ligands, such as those discussed above. Adjuvants that act through TLR3 include, without limitation, double-stranded RNA. Adjuvants that act through TLR4 include, without limitation, derivatives of lipopolysaccharides such as monophosphoryl lipid A (MPLA; Ribi ImmunoChem Research, Inc., Hamilton, Mont.) and muramyl dipeptide (MDP; Ribi) and threonyl-muramyl dipeptide (t-MDP; Ribi); OM-174 (a glucosamine disaccharide related to lipid A; OM Pharma SA, Meyrin, Switzerland). Adjuvants that act through TLR5 include, without limitation, flagellin. Adjuvants that act through TLR7 and/or TLR8 include single-stranded RNA, oligoribonucleotides (ORN), synthetic low molecular weight compounds such as imidazoquinolinamines (e.g., imiquimod (R-837), resiquimod (R-848)). Adjuvants acting through TLR9 include DNA of viral or bacterial origin, or synthetic oligodeoxynucleotides (ODN), such as CpG ODN. Another adjuvant class is phosphorothioate containing molecules such as phosphorothioate nucleotide analogs and nucleic acids containing phosphorothioate backbone linkages.

[0690] The adjuvant can also be oil emulsions (e.g., Freund's adjuvant); saponin formulations; virosomes and viral-like particles; bacterial and microbial derivatives; immunostimulatory oligonucleotides; ADP-ribosylating toxins and detoxified derivatives; alum; BCG; mineral-containing compositions (e.g., mineral salts, such as aluminium salts and calcium salts, hydroxides, phosphates, sulfates, etc.); bioadhesives and/or mucoadhesives; microparticles; liposomes; polyoxyethylene ether and polyoxyethylene ester formulations; polyphosphazene; muramyl peptides; imidazoquinolone compounds; and surface active substances (e.g. lysolecithin, pluronic polyols, polyanions, peptides, oil emulsions, keyhole limpet hemocyanin, and dinitrophenol).

[0691] Adjuvants may also include immunomodulators such as cytokines, interleukins (e.g., IL-1, IL-2, IL-4, IL-5, IL-6, IL-7, IL-12, etc.), interferons (e.g., interferon-.gamma.), macrophage colony stimulating factor, and tumor necrosis factor.

### Kits

[0692] In some aspects, the disclosure provides kits comprising at least an immunomodulatory fusion protein described herein and instructions for use. In some embodiments, the kits comprise, in a suitable container, an immunomodulatory fusion protein, one or more controls, and various buffers, reagents, enzymes and other standard ingredients well known in the art. In some embodiments, the kits further comprise instructions for use in combination with an immunotherapy.

[0693] In some embodiments, the container is at least one vial, well, test tube, flask, bottle, syringe, or other container means, into which an immunomodulatory fusion protein may be placed, and in some instances, suitably aliquoted. When an additional component is provided, the kit can contain additional containers into which this compound may be placed. The kits can also include a means for containing an immunomodulatory fusion protein, and any other reagent containers in close confinement for commercial sale. Such containers may include injection or blow-molded plastic containers into which the desired vials are retained. Containers and/or kits can include labeling with instructions for use and/or warnings.

[0694] In some embodiments, the disclosure provides a kit comprising a container comprising an immunomodulatory fusion protein described herein, an optional pharmaceutically acceptable carrier, and a package insert comprising instructions for administration of the composition for treating or delaying progression of cancer in an individual receiving an immunotherapy (e.g., CAR-T cells, cancer vaccine, anti-tumor associated antigen antibody, and/or immune checkpoint blockade).

[0695] In some embodiments, the disclosure provides a kit comprising a medicament comprising an immunomodulatory fusion protein described herein, an optional pharmaceutically acceptable carrier, and a package insert comprising instructions for administration of the medicament alone or in combination with an immunotherapy (e.g., CAR-T cells, cancer vaccine, anti-tumor associated antigen antibody, and/or immune checkpoint blockade), for treating or delaying progression of cancer in an individual receiving CAR-T cell therapy.

### Other Embodiments—Collagen-Binding IgG-Binding Fusion Proteins

[0696] In another aspect, the disclosure provides collagen-binding IgG-binding fusion proteins comprising an Ig-binding domain and a collagen-binding domain. The collagen-binding IgG-binding fusion proteins provided by the disclosure bind to an IgG (e.g., an immunomodulatory IgG) and to collagen, thereby localizing or sequestering the IgG within a tumor when administered.

[0697] In some embodiments, the collagen-binding domain is a collagen-binding domain as described supra. Exemplary IgG binding domains include a dimerized Z domain (one of the five IgG binding domains of protein A, herein referred to as “ZZ”) (Jendeberg et al., (1995) J Mol Recognit 8:270-278), a dimerized IgG binding domain of protein G (herein referred to as “SpG2”) (Jung et al., (2009) Anal Chem 81:936-942), an IgG binder isolated from a Sso7d yeast display library (Gera et al., (2011) J Mol Biol 409:601-616), an IgG binder isolated from a Fibronectin type III domain (Fn3) yeast display library (Hackel et al., (2010) J Mol Biol 401:84-96), and two small peptides designed to bind IgG Fc regions (herein referred to as “Fc-III-4C” and “RRGW) (Gong et al., (2015) Bioconjug Chem 27:1569-1573; Tsai et al., (2014) Anal Chem 86:2931-2938).

[0698] In some embodiments, the collagen-binding IgG-binding fusion protein is suitable for use in any of the methods described herein. In some embodiments, the collagen-binding IgG-binding fusion protein is used in combination with a therapeutic antibody (e.g., an immunomodulatory antibody). In some embodiments, the collagen-binding IgG-binding fusion protein is administered in combination with a therapeutic antibody for the treatment of cancer.

### EXAMPLES

[0699] While the present disclosure has been described with reference to the specific embodiments thereof, it should be understood by those skilled in the art that various changes may be made and equivalents may be substituted without departing from the true spirit and scope of the disclosure. In addition, many modifications may be made to adapt a particular situation, material, composition of matter, process, process step or steps, to the objective, spirit and scope of the present disclosure. All such modifications are intended to be within the scope of the disclosure.

### Example 1: Recombinant Expression of Collagen-Binding Fusion Proteins in Mammalian Cells

[0700] To evaluate the ability to express collagen-binding immunomodulatory molecules in mammalian cells, five His-tagged collagen-binding polypeptides fused to Gaussia Luciferase (Gluc) (collagen imaging probe (CNA35-Gluc), bacterial collagenase ColG domains s3a/s3b (ColG s3a/s3b-Gluc), heparin binding domain of murine placenta growth factor-2 (PLGF2HBD-Gluc), bacterial collagenase ColH domain s3 (ColH s3-Gluc), and murine protein lumican (Lumican-Gluc)) were transiently expressed in human embryonic kidney 293 (HEK293) cells. The amino acid sequences for these constructs are set forth in SEQ ID NOs: 128-132. Briefly, HEK293 cells (at 1 million cells/mL density) were transfected with sterile-filtered plasmid DNA (1 mg per liter cell culture) using polyethylenimine (2 mg per liter cell culture) in OptiPro serum-free media (20 mL per liter cell culture) (Thermo Fisher). TA99 was purified using rProtein A Sepharose Fast Flow resin (GE Healthcare) as previously described (Zhu et al. 2015). His-tagged proteins were isolated from HEK293 supernatant using TALON Metal Affinity Resin (Takara Bio Inc.). Cytokine-fusion proteins were then further purified by size exclusion chromatrography using a HiLoad 16/600 Superdex 200 pg column on an AKTA FPLC system (GE Healthcare) that had been pretreated for 4 hours with 1 M NaOH to remove endotoxin and subsequently equilibrated in sterile PBS (Corning). Following purification, all proteins were buffer exchanged into sterile PBS (Corning), 0.2 micron sterile-filtered (Pall Corporation) and confirmed to contain minimal levels of endotoxin (<0.1 EU per injection) using an chromogenic LAL assay (Lonza). To confirm their molecular weights, proteins were run alongside a Novex Prestained Sharp Protein Ladder on a 4-12% NuPAGE Bis-Tris protein gel (Life Technologies) with 1% MES running buffer. All proteins were stored at 4° C. but, prior to therapeutic injection, cytokine fusion proteins were warmed to room temperature to rescue lumican which demonstrates reversible cold denaturation. The relative expression levels of the His-tagged collagen-binding fusion proteins in the resulting eluates was evaluated by SDS-PAGE and by absorption spectrophotometry following size-exclusion chromatography of TALON-purification eluates.

[0701] Transient expression of Gluc (19.8 kDa) alone as well as Gluc-fused collagen-binding polypeptides ColG s3a/s3b-Gluc (46.1 kDa), ColH s3-Gluc (32.8 kDa), and Lumican-Gluc (56.6 kDa) in HEK293 cells was achieved, as determined by SDS-PAGE analysis of His-tagged proteins purified from HEK cell lysates. Protein staining at or near the respective expected molecular weight of each fusion protein was observed (data not shown). However, no expression was observed for CNA35-Gluc (54.4 kDa) or PLGF2HBD-Gluc (22.8 kDa) as measured by SDS-PAGE of protein purified from HEK cell lysates (data not shown).

[0702] Transient expression of Gluc, ColG s3a/s3b-Gluc, ColH s3-Gluc, and Lumican-Gluc in HEK293 cells was achieved, as determined by absorption spectrophotometry during size exclusion chromatography of recombinantly expressed and purified His-tagged proteins. A monomeric peak of UV radiation absorption at 280 nm (A280) was observed for each fusion protein (data not shown). No absorbance peaks were detected for CNA35-Gluc or PLGF2HBD-Gluc.

[0703] In addition to lumican, other mammalian collagen-binding polypeptides can be expressed as collagen-binding fusion proteins. The extracellular domain of the mammalian leukocyte-associated immunoglobulin-like receptor 1 (LAIR-1) protein is known to bind collagen (Lebbink et al., (2006) J Exp Med 203(6):1419-1425). Transient expression of the extracellular domain of His-tagged murine LAIR-1 (amino acid sequence set forth in SEQ ID NO: 181) in HEK293 as described above was achieved, as determined by absorption spectrophotometry during size exclusion chromatography of recombinantly expressed protein. LAIR-1 eluted as a monomeric peak as measured by UV radiation absorption at 280 nm (A280) (data not shown).

[0704] These results demonstrate that collagen-binding fusion proteins comprising prokaryotic or mammalian collagen-binding polypeptides express in mammalian cells. Expression of the His-tagged collagen-binding fusion proteins ColG s3a/s3b-Gluc, ColH s3-Gluc, and Lumican-Gluc as well as Gluc alone in HEK293 cells was achieved, while expression of CNA35-Gluc or PLGF2HBD-Gluc was not observed. Further, the extracellular domain of His-tagged LAIR-1 in HEK293 cells was expressed and purified. These results suggest that collagen-binding immunomodulatory molecules comprising a prokaryotic or mammalian collagen-binding polypeptide (e.g., ColG s3a/s3b, ColH s3, Lumican or LAIR) will express in mammalian cells.

### Example 2: Recombinant Collagen-Binding Fusion Proteins Bind Collagen In Vitro

[0705] To evaluate the ability of collagen-binding immunomodulatory molecules to bind collagen, the collagen-binding fusion proteins expressed and purified as described in Example 1 were tested for their ability to bind to collagen I- and collagen IV-coated plates by ELISA. Briefly, collagen I (Gibco) and collagen IV (Corning) coated 96 well-plates were blocked at room temperature for 1 hour with PBS+0.1% wt/vol bovine serum albumin (BSA)+0.05% wt/vol Tween-20 (PBSTA) and then incubated with various concentrations of lumican in PBSTA for 3 hours at room temperature. The lumican had been prewarmed for 10 minutes at 37 C to reverse its denaturation mediated by cold temperatures. Wells were washed with PBSTA and then incubated with a horseradish peroxidase-conjugated polyclonal anti-6×His (ab1187, Abcam) at a 1:4000 dilution in PBSTA for 1 hour at room temperature. Wells were washed again with PBSTA and then 1-Step Ultra TMB-ELISA Substrate Solution (Thermo Fisher Scientific) was added for 10 mins followed by 1 M sulfuric acid to stop the chromogenic reaction. Absorbance at 450 nm (corrected with a reference absorbance at 570 nm) measured using an Infinite M1000 microplate reader (Tecan). Wells with titrations of MSA served as a negative control.

[0706] Purified His-tagged collagen-binding fusion proteins Lumican-Gluc, ColG s3a/s3b-Gluc, and ColH s3-Gluc were evaluated by ELISA on a collagen I coated plate. As shown in FIG. 1A, only Lumican-Gluc and ColG s3a/s3b-Gluc bound to collagen I with a KD of 130 nM and 139 nM, respectively. ColH s3-Gluc did not bind collagen I specifically over Gluc background binding.

[0707] Purified His-tagged collagen-binding fusion proteins Lumican-Gluc, ColG s3a/s3b-Gluc, and ColH s3-Gluc were evaluated by ELISA on a collagen IV coated plate. As shown in FIG. 1B, Lumican-Gluc bound to collagen IV with a KD of 600 nM. ColG s3a/s3b-Gluc or ColH s3-Gluc did not bind collagen IV specifically over Gluc background binding.

[0708] Purified His-tagged murine LAIR-1 (denoted as mLAIR1-His) and His-tagged biotinylated lumican (denoted Lwt-His-b) were evaluated for binding to collagen type I by ELISA as a function of concentration. Binding was determined by ELISA using an anti-His antibody conjugated to horseradish peroxidase (HRP). As shown in FIG. 1C, LAIR-1 and lumican had similar binding affinity to collagen type I. Binding to a plate blocked with bovine serum albumin was also evaluated by ELISA. No binding was observed for either protein, indicating that measured binding to collagen type I was specific.

[0709] To further demonstrate the collagen-binding activity of the mammalian collagen-binding polypeptides described above, the ability of the purified His-tagged LAIR-1 and lumican collagen-binding polypeptides described in Example 1 to competitively bind collagen was tested. Briefly, collagen I (Gibco) 96 well-plates was blocked at room temperature for 1 hour with PBS+0.1% wt/vol bovine serum albumin (BSA)+0.05% wt/vol Tween-20 (PBSTA) and then incubated with various concentrations of LAIR in the presence of 50 nM of biotinylated lumican in PBSTA for 3 hours at room temperature. The lumican and LAIR had been prewarmed for 10 minutes at 37 C to reverse its denaturation mediated by cold temperatures. Wells were washed with PBSTA and then incubated with a horseradish peroxidase-conjugated polyclonal Streptavidin-HRP at a 1:400 dilution in PBSTA for 1 hour at room temperature. Wells were washed again with PBSTA and then 1-Step Ultra TMB-ELISA Substrate Solution (Thermo Fisher Scientific) was added for 10 mins followed by 1 M sulfuric acid to stop the chromogenic reaction. Absorbance at 450 nm (corrected with a reference absorbance at 570 nm) measured using an Infinite M1000 microplate reader (Tecan). Wells with titrations of MSA served as a negative control. The results of a competition ELISA detecting lumican binding in the presence of varying concentration of LAIR on a collagen coated plate is shown in FIG. 1D.

[0710] To evaluate the stability of a collagen-binding polypeptide following purification, the collagen-binding activity of lumican after thawing from a frozen state in solution was tested. Briefly, collagen I Affinity (K_{D}) of lumican incubated with various excipients (trehalose (T), BSA (B), collagen (C), protein alone (P)) in different conditions after thawing from frozen: 37 C for 3 weeks (blue), 4 C for 3 weeks (gray), 4 C for 2 weeks followed by 37 for 1 week (red). The binding affinity of lumican, in the presence of excipient (trehalose, bovine serum albumin, and collagen), to collagen I after thawing from frozen was determined by ELISA as described previously. The binding of affinity (K_{D}) remained similar regardless of which excipient was used. However, the binding affinity was reduced by approximately 50-fold if lumican was not warmed to 37° C. prior to measurement (data not shown).

[0711] These results demonstrate that collagen-binding fusion proteins comprising prokaryotic (e.g., ColG s3a/s3b) or mammalian (e.g., lumican) collagen-binding polypeptides bind to collagen I (FIG. 1A). These results also demonstrate that a collagen-binding fusion protein comprising a mammalian collagen-binding polypeptide (e.g., lumican) binds to both collagen I and IV (FIG. 1B). Further, these results demonstrate that the extracellular domain of LAIR-1 and lumican compete for binding to collagen I (FIG. 1C, 1D). These results suggest that collagen-binding immunomodulatory molecules comprising prokaryotic or mammalian collagen-binding polypeptides (e.g., ColG s3a/s3b, lumican, and LAIR-1) will bind to collagen.

### Example 3: Recombinant Collagen-Binding Fusion Proteins are Retained Following Intratumoral Injection

[0712] Collagens type I and IV are components of the thick fibrotic capsule surrounding tumors and the perivascular basement membrane, respectively. To evaluate expression of collagen types I and IV in mouse tumors, mice were inoculated with 1 million 4T1, MC38 or B16F10 tumor cells on day 0. Tumors were excised on day 10 and fixed in 10% neutral buffered formalin overnight, then embedded in paraffin and section to 5 micron thickness (CryoStar NX70). The tumor cross-sections were assessed for presence of collagen types I and IV by immunohistochemistry. Briefly, sections were stained with rabbit antibodies against collagen type I (ab34710, Abcam) and collagen type IV (ab6586, Abcam) at a 1:500 dilution in Tris-buffered saline with 0.1% vol/vol Tween-20, followed by a secondary staining using goat HRP-conjugated anti-rabbit antibody (ab6721, Abcam). Cross-sections of 4T1 (left), MC38 (middle), and B16F10 (right) tumors showed positive staining for collagen type I (top) and collagen type IV (bottom) (data not shown). Thus, collagen types I and IV are abundantly expressed in several syngeneic murine tumor models.

[0713] To evaluate the intratumoral retention of collagen-binding immunomodulatory molecules, the collagen-binding fusion proteins that bound to collagen I in Example 2 (Lumican-Gluc and ColG s3a/s3b-Gluc) were tested for their ability to remain associated at the site of intratumoral injection by in vivo fluorescence imaging. Briefly, 5×10⁵ 4T1 cells (murine mammary carcinoma cells) were injected into the mammary fat pad of BALB/c mice followed by intratumoral injection of Gluc alone, GolG s3a/s3b-Gluc, or Lumican-Gluc on day 7 post-tumor cell injection. Immediately after intratumoral injection, each mouse was monitored by in vivo bioluminescence imaging (epi-illumination, autoexposure settings).

[0714] The bioluminescent signal from the mouse injected Gluc alone decreased to a background level approximately 36 hrs. post injection (data not shown). The signal from the mouse injected with ColG s3a/s3b-Gluc decreased to a background level approximately 8.5 days and post-injection (data not shown). The signal from the mouse injected with Lumican-Gluc did not decrease below background level for the duration of the experiment (approximately 16.5 days post injection, data not shown).

[0715] These results demonstrate that the collagen-binding fusion proteins ColG s3a/s3b-Gluc and Lumican-Gluc are physically retained at the site of intratumoral injection over time. These results suggest that collagen-binding immunomodulatory molecules comprising a prokaryotic or mammalian collagen-binding polypeptide (e.g., ColG s3a/s3b or Lumican) will exhibit intratumoral retention and limited systemic dissemination.

### Example 4: Intratumoral Retention of Collagen-Binding Fusion Proteins Depend on Molecular Weight and Collagen Binding Activity

[0716] Several factors may dictate the intratumoral retention of a collagen-binding fusion protein: affinity for collagen, collagen concentration, size-dependent escape by diffusion or convection, and protein turnover. As a protein under 60 kDa, lumican (37 kDa) faces high permeability across vascular endothelium and is vulnerable to absorption into circulation, which may contribute to distribution away from the injection site and a decrease in intratumoral retention (McLennan et al., (2005) Drug Discov Today Technol 2:89-96; Egawa et al., (2013) Sci Rep 3:1932).

[0717] To evaluate the effect of molecular weight on the intratumoral retention and systemic distribution of collagen-binding immunomodulatory molecules, the retention of the collagen-binding polypeptide lumican fused to the 67 kDa mouse serum albumin (MSA) protein after intratumoral injection was determined by in vivo fluorescence imaging. Briefly, for tumor inoculation of B16F10-Trp2KO, 10⁶ cells resuspended in 50 uL of sterile PBS were injected subcutaneously into the right flanks of C57BL/6 female mice. Fusion proteins were labeled with five-molar excess of Alexa Fluor 647 NHS Ester (Life Technologies) for 30 minutes in PBS adjusted to pH 8. Excess dye was removed using a PD10 Desalting Column (GE Healthcare) and degree of labeling (DOL) for each protein calculated. Proteins compared in retention studies contained equimolar amount of dye. For Lumican-MSA (SEQ ID NO: 126) and MSA (SEQ ID NO: 183), 0.11 nmol of each construct (110 ug of Lumican-MSA and 71.7 ug of MSA was administered) was injected intratumorally into mice bearing B16F10-Trp2KO tumors five days after inoculation.

[0718] For assessing fusion protein retention, mice were imaged with a Xenogen IVIS Imaging System 100 (Xenogen) at indicated time points under auto-exposure epi-illumination fluorescence settings. During this time, mice were maintained on an alfalfa-free casein chow (Test Diet) to minimize gastrointestinal background fluorescence. Image analysis to determine total radiant efficiency was performed using Living Image (Caliper Life Sciences). B16F10 cells lacking tyrosinase-related protein-2, B16F10-Trp2KO, were used to inoculate tumors without pigmentation in order to maximize the fluorescence signal-to-noise.

[0719] Fluorescently-labeled Lumican, Lumican-MSA, or MSA were intratumorally injected and mice were monitored for total radiant efficiency over time. The fluorescent signal from lumican (37 kDa) was retained to a greater extent than the fluorescent signal from MSA (67 kDa) during the first 5 hours post-injection (data not shown) despite the smaller molecular weight of lumican. These data suggest that the intratumoral retention of lumican is dependent, at least in part, on its collagen binding activity. The fluorescent signal from lumican-MSA was also retained to a greater extent than the fluorescent signal from MSA (FIG. 2A). Lumican-MSA (104 kDa) is significantly larger than lumican (37 kDa), and although they each possess an identical collagen binding site, lumican-MSA is retained to a greater extent than lumican alone (FIG. 2A), presumably due to more rapid clearance of the smaller lumican construct.

[0720] To further evaluate the effect of molecular weight on the systemic distribution, the amount of fluorescence from serum of mice injected with fluorescently-labeled lumican fused to MSA over time was determined. Fluorescently-labeled MSA was used as a comparator. For assessing serum fluorescence after injection, a small volume of blood (<10 uL) was drawn by capillary action into glass micro-hematocrit heparin coated tubes (VWR) from the tip of the tail at indicated time points. Tubes were sealed at one end with parafilm and stored upright protected from the light at 4 C to allow serum separation from clotted blood by gravity. Tubes were scanned using a flatbed Typhoon Trio Variable Mode Imager (GE Healthcare) (excitation laser: 633 nm; emission filter: 670 BP; PMT: 450-500 V) and serum fluorescence quantified using Fiji image analysis software.

[0721] As shown in FIG. 2B, the fluorescence signal from serum of mice injected with lumican-MSA was lower over time compared to the fluorescence signal from serum of mice injected with MSA as a % of injected dose. These results demonstrate that lumican-MSA exhibits less systemic distribution than MSA alone.

[0722] Lumican co-localization with collagen types I and IV was assessed following intratumoral administration by immunofluorescence imaging. Briefly, B16F10 tumors were excised following intratumoral injection of fluorescently-labeled lumican. The tumors were preserved overnight in periodate-lysine-paraformaldehyde at 4° C., then cryoprotected with 30% sucrose in PBS for 8 hours at 4° C., and then frozen slowly in a cryomold containing 100% OCT compound (Sakura Finetek USA Inc.) on dry ice. Frozen tumor molds were sectioned to 50 micron thickness (CryStar NX70), and sections were dried at room temperature for an hour prior to antigen retrieval. For antigen retrieval, tissue sections were heated at 60° C. in 10 mM sodium citrate with 0.05% Tween20 for 1 hour, washed in PBS, and then treated with 2 mg/mL of hyaluronidase for 30 minutes at room temperature. Sections were washed in immunomix (PBS containing 0.2% wt/vol bovine serum albumin, 0.05% wt/vol sodium azide, 0.3% vol/vol Triton X-10, 10% vol/vol donkey serum), then permeabilized with cold acetone for 10 minutes at −20° C., and then blocked in Immunomix for 1 hour at room temperature. Staining was performed with rabbit antibodies against collagen type I (ab34710, Abcam) and collagen type IV (ab6586, Abcam) at a 1:200 dilution in Immunomix overnight at room temperature in a humidifying chamber. After several PBS washes, sections were stained with secondary AF488-conjugated goat anti-rabbit antibody at 1:500 dilution in Immunomix overnight at room temperature in a humidifying chamber. After several washes, sections were fixed in 1% neutral buffered formalin in PBS and mounted in VECTASHIELD anti-fade mounting medium. Sections were imaged by confocal microscopy. By overlaying fluorescent signal of collagen type I or type IV with fluorescent signal of lumican, it was determined that lumican co-localized with both collagen type I and type IV in B16F10 tumors to a high extent (data not shown).

[0723] These results demonstrate that both affinity to collagen and increased molecular weight contribute the intratumoral retention and systemic distribution of collagen-binding fusion proteins. These results suggest that increasing the affinity to collagen and the molecular weight of a collagen-binding immunomodulatory molecule will increase intratumoral retention and decrease systemic distribution, thereby increasing therapeutic effect.

### Example 5: Proximity to Bound Collagen Decreases Payload Activity of Collagen-Binding Fusion Proteins

[0724] To evaluate the effect of collagen-binding on payload activity, the intratumoral bioluminencence of Lumican-Gluc compared to ColG-Gluc was compared in vivo. Briefly, equimolar amounts (0.3 nmol) of Lumican-Gluc or GolG-Gluc were intratumorally injected into B16F10 melanoma tumor-bearing mice. Less intratumoral bioluminescence was observed with Lumican-Gluc compared to ColG-Gluc despite an equimolar (0.3 nmol) injection. Specifically, 4/5 mice injected with ColG-Gluc had detectable bioluminescence over background, while only 1/5 mice injected with Lumican-Gluc had detectable bioluminescence over background (data not shown). Interestingly, bioluminescence signal was only detected outside the tumor, presumably from construct that was leaking out of the tumor. The lack of intratumoral bioluminescence from collagen-bound constructs suggests that the enzyme is not optimally functional when forced into close proximity to collagen. This result informs the need for a spacer protein, like MSA, to help better separate collagen from any future payload.

[0725] Since collagen is an insoluble protein and thus susceptible to solid-phase behavior like surface adsorption of proximal soluble proteins, the MSA acts as a large hydrophilic spacer protein between the payload and lumican to protect the payload from adsorption and functional denatuation. For our localization approach, any soluble payload is forced into the solid-liquid interface by lumican and can be adsorbed onto a collagen fiber potentially rendering it functionally inert (as seen with Gluc). To prevent adsorption of our payload onto collagen, we operably link mouse serum albumin (MSA) to lumican as a large spacer protein between the payload and collagen.

### Example 6: Synergistic Effect of Immunomodulatory Collagen-Binding Molecules and Anti-Tumor Antigen Antibody in Mouse Melanoma Tumor Model

[0726] The synergy between anti-tumor antigen antibody and interleukin-2 (IL-2) is well characterized (Zhu et al., (2015) Cancer Cell 27:489-501). The effect of fusing IL-2 to collagen-binding molecules was evaluated by preparing IL-2 fused to the C-terminus of Lumican-MSA. MSA was incorporated to ensure steric access of receptors to IL-2 when bound to collagen fibrils and also to increase the construct's molecular weight and thereby reduce diffusive flux from the tumor. As an equivalently bioactive comparator, IL-2 was expressed as a fusion to MSA (MSA-IL2), allowing the effects of collagen binding to be largely separated from size-based improvements in tumor retention of small cytokines like wild-type IL-2. Thus, IL-2 was expressed as a fusion to MSA alone or as a fusion to the C-terminus of Lumican-MSA using the methods described in Example 1. His-tagged cytokine-fusion proteins were purified by TALON metal affinity resin as described in Example 1. Cytokine-fusion proteins were further purified by FPLC (AKTA, GE Healthcare) using a size exclusion chromatography column (HiLoad 16/600 Superdex 200 pg) that had been pre-treated for 4 hours with 1M NaOH to remove endotoxin, then subsequently equilibrated in sterile PBS. After purification, the proteins were buffer exchanged into sterile PBS, sterile filtered by a 0.2 micron membrane filter (Pall Corporation) and confirmed to contain minimal endotoxin (<0.1 EU per dose) using a chromogenic LAL assay (Lonza).

[0727] The proteins demonstrated >90% monomeric expression when evaluated by absorbance at 280 nm during size exclusion chromatography (data not shown). Additionally, the ability of the proteins to induce cell proliferation was evaluated. CTLL-2 cells were seeded on tissue culture plates either uncoated or coated with collagen type IV at a density of 5000 cells/well. The cells were stimulated with various concentrations of MSA-IL2, Lumican-MSA-IL2, or Lumican for 48 hours. Cell proliferation was determined by WST-1 based colorimetric assay (Roche) according to manufacturer's instructions. While Lumican resulted in no proliferation, treatment with MSA-IL2 and Lumican-MSA-IL2 resulted in similar levels of cell proliferation, regardless of the presence or absence of collagen type IV (data not shown). Thus, MSA-IL2 and Lumican-MSA-IL2 have equivalent bioactivity.

[0728] Additionally, serum levels of the IL-2 fusions following intratumoral injection were quantified as described in Example 4. Fluorescently-labeled lumican-MSA-IL2 and MSA-IL2 were injected into B16F10-Trp2KO tumors, and serum fluorescence levels were quantified following injection at different time points. The fluorescence signal from serum of mice injected with lumican-MSA-IL2 was lower as over time as compared to the fluorescence signal from serum of mice injected with MSA-IL2 when measured as a % of injected dose (data not shown). These results demonstrate that lumican-MSA-IL2 binds to intratumoral collagen in vivo and as a result, exhibits less systemic distribution than MSA-IL2 alone.

[0729] To characterize the anti-tumor efficacy of combinations of immunomodulatory collagen-binding molecules with tumor antigen-targeting antibodies, fusion proteins comprising a collagen-binding polypeptide fused to the cytokine IL-2 were assessed for synergy with a mouse monoclonal anti-TYRP1 antibody (TY99) in a B16-F10 melanoma model.

[0730] Briefly, C57BL/6 mice aged 6-8 weeks were injected subcutaneously into the right flanks with 1×10⁶ B16-F10 mouse melanoma cells (ATCC) in 50 μL sterile PBS. Mice with established B16-F10 melanoma tumors were treated systemically with 100 μg/dose anti-TYRP-1 antibody (TA99) via intraperitoneal (i.p.) injection and with 13 μg/dose of the collagen-binding IL-2 fusion protein lumican-MSA-IL2 via intratumoral injection (i.tu.). Mice injected with MSA-IL2 (SEQ ID NO: 121) (9 μg/dose) or lumican (SEQ ID NO: 182) (4 μg/dose) were used as comparators. Mice injected with IL-2 fusion proteins (lumican-MSA-IL2 (SEQ ID NO: 120) or MSA-IL2) received the equivalent of 0.11 nmol/dose of IL-2. Animals were euthanized at a euthanasia endpoint, which was either 20% total body weight loss or tumor area exceeding 100 mm² (length×width).

[0731] Percent survival of mice with tumors treated with MSA-IL2, lumican-MSA-IL2, lumican alone or in combination with TA99 is shown in FIG. 3A-3B. Monotherapy of mice administered lumican-MSA-IL2 or MSA-IL2 alone imparted a limited survival benefit (FIG. 3A). The combination of TA99 and lumican provided no survival benefit (FIG. 3B), however, administration of a combination of TA99 and either MSA-IL-2 or lumican-MSA-IL2 showed a synergistic survival benefit to mice (FIG. 3B). The combination with lumican-MSA-IL2 imparted a greater survival benefit compared to the combination with MSA-IL2 (FIG. 3B).

[0732] After cessation of treatment, several mice developed localized skin depigmentation or vitiligo which is indicative of a melanocyte-specific T cell response. Nearly all mice injected with lumican-MSA-IL2 and TA99 developed a patch of vitiligo localized to the site of injection (16 out of 17 mice) whereas only one out of 17 mice treated with MSA-IL2 and TA99 displayed this side effect. Together, these observations indicate that lumincan-MSA-IL2 anchors IL-2 intratumorally and enhances IL-2's synergy with TA99 by increasing anti-tumor T cell responses and overall survival.

[0733] To determine if intratumoral injection of lumican-MSA-IL-2 was necessary for the improved outcomes when used in combination with TA99, we evaluated the efficacy of this combination when lumican-MSA-IL2 was injected into other corporeal sites. When lumican-MSA-IL2 was administered peritumorally (peri.tu) (i.e. adjacent to the lesion) (FIG. 3C) or intranodally (i.e. into the tumor draining inguinal lymph node) (FIG. 3D), efficacy was attenuated. All survival benefit of the combination diminished when lumican-MSA-IL2 was administered subcutaneously at the tail base, 2 cm distal to the tumor site (FIG. 3C).

[0734] These results show that treatment of tumor-bearing mice with lumican-MSA-IL2 in combination with TA99 provides a synergistic anti-tumor effect and that intratumoral localization of IL-2 is required for maximal efficacy of this combination therapy.

### Example 7: Synergistic Effect of Immunomodulatory Collagen-Binding Molecules and Anti-Tumor Antigen Antibody is Dependent on CD8+ T Cells, Dendritic Cells, and IFNγ

[0735] High dose IL-2 supports the proliferation and effector functions of T cells and NK cells, but also promotes neutrophilia and eosinophilia (Macdonald et al., (1990) Br J Haematol 76(2):168-173; Li et al., (1996) Inflammation 20(4):361-372). Given the known diverse effects of IL-2 on immune cells, the contribution of distinct leukocytes types to the therapeutic efficacy of lumican-MSA-IL2 was determined by antibody-mediated cellular depletions. Immune cell subsets or IFNγ were depleted by intraperitoneal (i.p.) administration of depleting antibody beginning one day before the first treatment until one week after the last treatment. TA99 and lumican-MSA-IL2 were administered as described for FIG. 3B. CD8+ T cells, NK cells or neutrophils were depleted using 400 μg of anti-CD8α (2.43, BioXCell), anti-NK1.1 (PK136, BioXCell), or anti-Ly6G (1A8, BioXCell) antibody every four days, respectively. Macrophages or soluble IFNγ were depleted using 300 μg of anti-CSF1R (AFS98, BioXCell) or 200 μg of anti-IFNγ (XMG1.2, BioXCell) every other day, respectively. Eosinophils were depleted using 1 mg of anti-IL-5 (TRFK5, BioXCell).

[0736] To assess contribution of immune cell subsets, 6-8 week old C57BL/6 wildtype (WT) or BatF3^{-/-} mice (B6.129S(C)-Batf3^{tm1Kmm}/J; Jackson Laboratory), which are deficient in cross-presenting dendritic cells (DCs), were injected subcutaneously into the right flanks with 1×10⁶ B16-F10 mouse melanoma cells (ATCC) in 50 μL sterile PBS. Depletion of natural killer (NK) in WT mice did not alter efficacy of lumican-MSA-IL2 in combination with TA99 (FIG. 4). Depletion of neutrophils, eosinophils, or macrophages in wildtype mice also did not alter efficacy of lumican-MSA-IL2 in combination with TA99 (data not shown), indicating that no single innate cell population was solely responsible for tumor control. However, depletion of CD8+ T cells (anti-CD8a), cross-presenting DCs (BatF3^{-/-}), and IFNγ (anti-IFNγ) did alter efficacy of treatment indicating that they were indispensable for tumor rejection (FIG. 4). Survival statistics were determined by log-rank Mantel-Cox test.

[0737] These results show that treatment of tumor-bearing mice with lumican-MSA-IL2 in combination with TA99 provides a synergistic anti-tumor effect that is dependent on CD8+ T cells, dendritic cells and IFNγ.

### Example 8: Combination of Immunomodulatory Collagen-Binding Molecules and Anti-Tumor Antigen Antibody Establishes Protective Memory and Induces Systemic Tumor-Specific Cellular Immunity

[0738] The durable disease-free survival and the reliance on components of adaptive immunity observed after treatment with lumican-MSA-IL2 in combination with TA99 as shown above suggested that cured tumor-free mice might be resistant to tumor re-challenge. To determine if cured tumor-free mice treated with lumican-MSA-IL2 in combination with TA99, cured C57BL/6 mice from the experiment shown in FIG. 3B were re-challenged on day 100 with 1×10⁶ B16-F10 cells inoculated on the contralateral flank. A majority of long-term survivors treated with lumican-MSA-IL2 in combination with TA99 rejected a rechallenge with B16-F10 inoculated on the contralateral flank (9/15 mice).

[0739] Although tumor eradication by cell-mediated immunity requires systemic immune activation (Spitzer et al., (2017) Cell 168:487-502), the strictly localized patch of vitiligo observed following treatment with lumican-MSA-IL2 in combination with TA99 (see Example 6) prompted an evaluation of tumor-specific T cell responses outside the treated tumor lesion. To determine if treatment with lumican-MSA-IL2 in combination with TA99 induces a systemic anti-tumor T cell response, an IFNγ ELISPOT was performed using splenocytes harvested four days after treatment of mice as described in FIG. 3B. Treatment with TA99 in combination with MSA-IL2 or lumican were used as comparators. The number of IFNγ spot forming units (SFUs) in response to stimulation with B16F10 target cells was quantified. Treatment with TA99 in combination with lumican-MSA-IL2 yielded more peripheral splenocytes expressing IFNγ than in combination with MSA-IL2. Specifically, treatment with TA99+Lumican-MSA-IL2 resulted in approximately 20 SFUs per 1 million splenocytes, while treatment with TA99+MSA-IL2, with TA99+lumican, or no treatment resulted in less than approximately 7 SFUs per 1 million splenocytes.

[0740] To confirm the intracellular IFNγ staining on splenocytes was generated by tumor-specific CD8+ T cells, splenocytes were harvested four days after treatment of mice as described in FIG. 3B. Harvested splenocytes were simulated with irradiated B16-F10 or 4T1 for 12 hours in the presence of brefeldin A and subsequently stained for surface markers (CD4, CD3 and CD8) and intracellular IFNγ (n=5 mice/group). FIG. 5A shows the quantification of IFNγ+cells among live CD45+CD3+CD8+ T cells as determined by flow cytometry. Data were analyzed by one-way ANOVA with Tukey's multiple comparison test.

[0741] The results shown in FIG. 5A demonstrate that stimulation with irradiated B16-F10 tumor cells, but not 4T1 tumor cells, induced the expression of IFNγ in splenocytes, confirming that peripheral B16F10-specific CD8+ T cell responses in spleen were induced by treatment of tumor-bearing mice with lumican-MSA-IL2 in combination with TA99. These results also show that treatment of tumor-bearing mice with TA99 in combination with tumor collagen-anchored lumican-MSA-IL2 induced a greater tumor-specific systemic response than in combination with unanchored MSA-IL2.

[0742] To determine the ability of peripheral effectors (e.g., peripheral tumor-specific T cells) induced by treatment with TA99 in combination with lumican-MSA-IL2 to control a distant untreated tumor lesion where exogenous cytokine support is limited, mice were inoculated 1×10⁶ B16-F10 cells subcutaneously to establish tumors on both flanks and administered TA99 systemically (i.p) and IL-2 (as lumican-MSA-IL2 or MSA-IL2) intratumorally (i.tu) into only the right, or ipsilateral, tumor. FIG. 5B shows the mean tumor areas for uninjected contralateral tumors and for intratumorally-injected ipsilateral tumors over time. The results shown in FIG. 5B demonstrate that the combination of TA99 with MSA-IL2, which can leak out of the ipsilateral tumor and to the contralateral lesion after injection, imparted some contralateral tumor control but most mice succumbed to tumor burden. In contrast, the combination of TA99 with lumican-MSA-IL2, which is isolated to the ipsilateral tumor, halted both ipsilateral and contralateral tumor growth leading to durable cures in several mice. These results show systemic anti-tumor response elicited by anchoring IL-2 via tumor collagen-binding is superior to diffuse IL-2 stimulation in controlling and eradicating disseminated disease.

### Example 9: Treatment of Tumor-Bearing Mice with a Collagen-Binding IL-12 Fusion Protein does not Induce IL-12-Related Weight Loss

[0743] After observing improvement of anti-tumor therapeutic effects by collagen-anchoring of IL-2 as shown in the Examples above, the effect(s) of anchoring IL-12, another dose-limited cytokine, to collagen was evaluated. IL-12 acts as a key regulator in type-1 cell mediated immunity, a pathway known to be critical for effective anti-tumor responses (Green et al., (2017) J Biol Chem 292:13925-13933). Despite promising preclinical work, severe toxicities and fatalities halted an early clinical trial administering systemic IL-12 (Lasek et al., (2014) Cancer Immunol Immunother 63(5):419-435). IFNγ, induced by IL-12 stimulation of NK cells and T cells, was implicated in the toxicity, however, IL-12 is also inextricably coupled to its efficacy (Leonard et al., (1997) Blood 90:2541-2548).

[0744] Thus, IL-12 was expressed and purified as a fusion to MSA alone or as a fusion to the N-terminus of Lumican-MSA (IL12-MSA-Lumican) using the methods described in Examples 1 and 6. Briefly, murine IL-12 was expressed in a single chain format with a 15 amino acid glycine-serine linker between the p40 and p35 subunits (scIL12). To generate a collagen-anchoring version of IL-12, scIL12 was fused to the N-terminus of lumican with an MSA spacer, henceforth referred to as IL12-MSA-Lumican (SEQ ID NO: 123). IL12-MSA (SEQ ID NO: 122), a non-anchoring version of IL-12, was used as a comparator. The IL12-MSA and IL12-MSA-Lumican proteins demonstrated >90% monomeric expression when evaluated by absorbance at 280 nm during size exclusion chromatography (data not shown).

[0745] Additionally, serum levels of the IL-12 fusions following intratumoral injection were quantified as described in Example 4. Fluorescently-labeled IL12-MSA-lumican and IL12-MSA were injected into B16F10-Trp2KO tumors, and serum fluorescence levels were quantified following injection at different time points. The fluorescence signal from serum of mice injected with IL12-MSA-lumican was lower as over time as compared to the fluorescence signal from serum of mice injected with IL12-MSA when measured as a % of injected dose (data not shown). These results demonstrate that IL12-MSA-lumican binds to intratumoral collagen in vivo and as a result, exhibits less systemic distribution than IL12-MSA alone.

[0746] To determine if retaining IL-12 to the tumor via collagen-binding would ameliorate IL-12-mediated toxicities, IL-12 fused to lumican-MSA was evaluated in a mouse melanoma tumor model. C57BL/6 mice, aged 6-8 weeks, were inoculated with 1×10⁶ B16-F10 melanoma cells on day 0. Weight change from baseline of these mice was monitored after treatment with either intratumoral (i.tu.) injections of PBS (n=6), 17.8 μg/dose IL12-MSA (n=7), or 23.1 μg/dose IL12-MSA-Lumican (n=7), or intraperitoneal (i.p.) injection of 17.8 μg/dose IL12-MSA (n=7) on day 6 and day 12. Mice injected with IL-12 fusion proteins (IL12-MSA-lumican or IL12-MSA) received the equivalent of 140 pmol/dose of IL-12.

[0747] As shown in FIG. 6A, intratumoral administration of IL12-MSA in B16-F10 tumor-bearing mice lead to significant weight loss, a noninvasive readout for systemic cytokine (e.g., IFNγ) toxicity. Systemic administration of IL12-MSA by intraperitoneal injection resulted in an identical weight loss profile. In contrast, an equimolar intratumoral injection of IL12-MSA-Lumican did not cause weight loss. Collectively, these results demonstrate that local administration in the absence of an effort towards intratumoral retention via collagen binding is insufficient in alleviating IL-12-mediated toxicity and that collagen-anchoring provided sufficient intratumoral confinement to curb overt systemic toxicities of IL-12, resulting in improved therapeutic index.

[0748] The survival of animals treated as in FIG. 6A was also evaluated. Mice were euthanized according to the criteria described in Example 6. As shown in FIG. 6B, treatment with an IL12 fusion improved survival over untreated control mice or mice treated with lumican. Treatment with IL12-MSA-Lumican resulted in a modest improvement in survival compared to IL12-MSA.

[0749] The dose of IL12 used to treat B16F10 tumors was titrated to determine dose-dependent effects on toxicity and anti-tumor efficacy. Mice inoculated with B16F10 tumors on day 0 as described above were treated on day 5 with an intratumoral injection of IL12-MSA or IL12-MSA-Lumican at different doses. Untreated control mice received an intratumoral injection of PBS. The effect of dose was evaluated on tumor area (e.g., measure of efficacy) and % weight change (e.g., measure of toxicity). The doses of IL12-MSA and IL12-MSA-Lumican that were evaluated included the mass equivalent of 140 pmol IL12, 14 pmol IL12, 1.4 pmol IL12, or 0.14 pmol IL12. IL12-MSA-Lumican showed no toxicity at any dose tested, but demonstrated reduced efficacy at a 1.4 or 0.14 pmol dose of IL12 (data not shown). While IL12-MSA demonstrated both reduced toxicity and reduced efficacy with decreased dose (data not shown). Thus to evaluate IL12 fusions in combination with other therapeutic agents, a 14 pmol IL12 dose was identified as having a tolerable toxicity index while maintaining therapeutic efficacy.

### Example 10: Synergistic Anti-Tumor Effect of Collagen-Binding IL-2 and IL-12 Fusion Proteins in a Mouse Tumor Model

[0750] Combinations to potentiate the anti-tumor effects of IL-12 have been theorized but safety concerns have largely precluded their actualization (Lasek et al., (2014) Cancer Immunol Immunother 63(5):419-435). The improved therapeutic index of IL12-MSA-lumican, as indicated by the absence of treatment-related weight loss in Example 9, prompted the evaluation of this cytokine in combination with other therapeutic agents. IL-2 and IL-12 are known to engage complementary signaling pathways to stimulate NK cells and T cells (Wigginton & Wiltrout (2002) Expert Opin Biol Ther 2:513-524) Additionally, IL-2 upregulates the expression of a IL-12 receptor subunit beta 2 (Wang et al., (2000) Blood 95:3183) and IL-12 sustains surface expression the high-affinity IL-2 receptor CD25 (Starbeck-Miller et al., (2013) J Exp Med 211:105-120). By reciprocal positive feedback, IL-2 and IL-12 augment and prolong the effect of each other (Wigginton et al., (1996) J Natl Cancer Inst 88:38-43). Despite promising efficacy, several clinical trials around this combination have been terminated (Wigginton & Wiltrout (2002) Expert Opin Biol Ther 2:513-524; Gollob et al., (2003) J Clin Oncol 21:2564-2573; Addison et al., (1998) Gene Ther 5:1400-1409; Wigginton et al., (2001) J Immunol 166:1156-1168). Notably, the combination of IL-2 and IL-12 also significantly enhances the production of IFN-γ by T cells and NK cells (Wigginton & Wiltrout (2002) Expert Opin Biol Ther 2:513-524).

[0751] To evaluate the therapeutic effect(s) of a combination of immunomodulatory collagen-binding molecules comprising IL-2 or IL-12, lumican-MSA-IL2 and IL12-MSA-lumican were tested in combination in a mouse melanoma tumor model essentially as described in Example 9. However, given the known toxicities arising from administration of non-collagen-anchored cytokines in combination described above, the dosages of IL12-MSA-lumican and IL12-MSA-IL-12 were reduced to 1/10 of what was previously administered in Example 9 to 14 pmol/dose. As in Example 6, mice administered lumican-MSA-IL2 received 13 μg/dose. Mice administered MSA-IL2 received 9 μg/dose. Mice injected with IL-2 fusion proteins (lumican-MSA-IL2 or MSA-IL2) received the equivalent of 0.11 nmol/dose of IL-2.

[0752] Intratumoral administration of the reduced dose (14 pmol/dose) of IL12-MSA alone or MSA-IL2 alone did not result in weight loss or significant tumor growth delay in B16-F10 tumor-bearing mice (data not shown). In contrast, the administration of IL12-MSA in combination with MSA-IL2 resulted in weight loss and increased survival (FIG. 7). In contrast, combination treatment using the collagen-anchoring versions, IL12-MSA-Lumican and Lumican-MSA-IL2, increased survival to a greater extent than combination of IL12-MSA and MSA-IL2 and did not result in concomitant weight loss (FIG. 7).

[0753] These results demonstrate that treatment of tumor-bearing mice with a combination of collagen-binding IL12-MSA-lumican and lumican-MSA-IL2 resulted in increased survival of mice to a greater extent than treatment with a combination of non-collagen-binding IL12-MSA and MSA-IL2. Furthermore, these results show that treatment of mice with a combination of collagen-binding IL12-MSA-lumican and lumican-MSA-IL2 prevented treatment-related toxicity associated with co-administration of IL-12 and IL-2, thereby providing a therapeutic modality for this cytokine combination.

### Example 11: Synergistic Effect of Collagen-Binding IL-2 and IL-12 Fusion Proteins is Dependent on CD8+ T Cells and Dendritic Cells

[0754] The immune cell types responsible for the efficacy of intratumoral IL12-MSA-Lumican and Lumican-MSA-IL2 combination therapy was determined by antibody-mediated cellular depletions essentially as described in Example 7. As shown in FIG. 8A, CD8+ T cells and cross-presenting dendritic cells are indispensable for efficacy, as depletion of these cell types reduces survival of tumor-bearing mice treated intratumorally with a combination of IL12-MSA-Lumican and Lumican-MSA-IL2. In contrast, depletion of NK cells, neutrophils, eosinophils, or macrophages did not significantly affect the survival outcome (FIG. 8B). Antibody-mediated depletion of IFNγ, a cytokine known to be amplified by concurrent IL-2 and IL-12 stimulation (Gollob et al., (1999) J Immunol 162(8):4472-4481), also did not significantly alter survival (FIG. 8A), however, the lack of effect might be attributed to insufficient depletion of IFNγ.

[0755] To further evaluate the contribution of immune cell types toward the anti-tumor efficacy provided by the combination of IL12-MSA-lumican and lumican-MSA-IL2 in tumor-bearing mice, immunophenotyping of tumor-infiltrating immune cells was performed. Mice were inoculated with 1 million B16F10 tumor cells on day 0 and treated with either intratumoral injection of PBS, IL12-MSA and MSA-IL2, or IL12-MSA-Lumican and Lumican-MSA-IL2 on day 5. Tumors were excised on day 11. Immune cell infiltrates of tumors were analyzed as previously described. (Moynihan et al., (2016) Nat Med 22:1402-1410); Zhu et al., (2015) Cancer Cell 27:489-501). Briefly, resected tumors were weighed, dissociated into small pieces, incubated in RPMI-1640 containing 1 mg/mL collagenase and dispase (Roche) and 25 ug/mL DNase I (Roche) for 30 minutes at 37 C. Further mechanical dissociation was used to generate a single cell suspension for staining. Cells were analyzed on BD FACS LSRFortessa™ and data was analyzed using FlowJo® (FlowJo, Inc). Cells were stained for surface and intracellular markers to delineate cell types as follows:

[0756] NK cells (live CD45⁺ CD3⁻ NK1.1⁺)

[0757] Treg cells (live CD45⁺ CD3⁺ NK1.1⁻ CD4⁺ CD8⁻ CD25⁺ FoxP3⁺)

[0758] CD4 cells (live CD45⁺ CD3⁺ NK1.1⁻ CD4⁺ CD8⁻ CD25^{+/-} FoxP3⁻)

[0759] CD8 T cells (live CD45⁺ CD3⁺ NK1.1⁻ CD4⁻ CD8⁺)

[0760] Monocytes/Macrophages (live CD45⁺ CD11b⁺ Ly6G⁻ CD11c⁻ F4/80⁺)

[0761] CD11b⁺ DC (live CD45⁺ CD11b⁺ MHCII⁺ CD11c⁺)

[0762] CD11b⁻ DC (live CD45⁺ CD11b⁻ MHCII⁺ CD11c⁺)

[0763] Neutrophil (live CD45⁺ CD11b⁺ Ly6G⁺)

[0764] As shown in FIG. 8C, the fold change of CD8+ T cells in tumor infiltrates from mice treated with a combination of IL12-MSA-Lumican and Lumican-MSA-IL2 (Lumican versions) relative to treatment with PBS is higher than the fold change from mice treated with IL12-MSA+MSA-IL2 (MSA versions) relative to treatment with PBS. Furthermore, tumors treated with the lumican-MSA cytokine fusions had more infiltrating CD8+ T cells compared to tumors treated with the MSA cytokines fusions six days after initial treatment (FIG. 8D) and had higher surface expression of PD-1 (FIG. 8E).

[0765] The production of tumor-specific T cells in response to treatment was further evaluated in splenocytes isolated at six days following treatment by IFNγ ELISPOT. The number of IFNγ spot-forming units (SFU) in response to stimulation with B16F10 target cells was quantified. Treatment with lumican-MSA cytokine fusions yielded approximately 20 SFU per 1 million splenocytes, compared to approximately 15 SFU per 1 million splenocytes for MSA cytokine fusions or approximately 2 SFU per 1 million splenocytes for untreated animals. Thus, treatment with lumican-MSA cytokine fusions resulted in an increase in the number of peripheral tumor-specific T cells compared to no treatment or treatment with MSA-cytokine fusions.

[0766] These results demonstrate that the anti-tumor efficacy (e.g., increased survival) provided by the combination of IL12-MSA-Lumican and Lumican-MSA-IL2 is dependent on CD8+ T cells and dendritic cells. Furthermore, these results demonstrate that intratumoral treatment of tumor-bearing mice with a combination of IL12-MSA-Lumican and Lumican-MSA-IL2 provides anti-tumor efficacy, at least in part, by inducing the infiltration of activated CD8+ T cells into the tumor and inducing production of peripheral tumor-specific T cells.

### Example 12: Synergistic Effect of Collagen-Binding IL-2 and IL-12 Fusion Proteins and Anti-PD-1 Antibody Combination in a Mouse Melanoma Tumor Model

[0767] The upregulation of surface PD-1 on tumor infiltrating CD8 T cells in response to lumican-cytokine treatment as described in Example 11 prompted an evaluation of the anti-tumor efficacy of a combination of an anti-PD-1 antibody (clone 29F. 1A12, BioXCell), IL12-MSA-lumican, and lumican-MSA-IL2 in a mouse melanoma tumor model. Briefly, C57BL/6 mice aged 6-8 weeks were inoculated with 1×10⁶ B16-F10 tumor cells subcutaneously into the right flank on day 0. Tumor-bearing mice were treated with a combination of Lumican-MSA-IL2 and IL12-MSA-Lumican or a combination of MSA-IL2 and IL12-MSA intratumorally at dosages as described in Example 10 and with anti-PD-1 antibody (200 μg/dose) intraperitoneally on day 5 and day 11. Percent weight change from baseline and percent survival was monitored and is shown in FIG. 9.

[0768] As shown in FIG. 9, the inclusion of anti-PD-1 antibody in combination with IL12-MSA and MSA-IL2 or with IL12-MSA-Lumican and Lumican-MSA-IL2 did not alter the weight loss trends observed previously (FIG. 7). However, the addition of anti-PD-1 antibody improved survival outcomes for mice treated with the IL12-MSA+MSA-IL2 combination but did not further improve survival for mice treated with the IL12-MSA-Lumican+Lumican-MSA-IL2 combination.

[0769] Localized vitiligo occurred more frequently in mice treated with anti-PD-1 antibody, IL12-MSA-Lumican, and Lumican-MSA-IL2 (4/5 mice with vitiligo at injection site) compared to mice treated with anti-PD-1 antibody, IL12-MSA, and MSA-IL2 (1/5 mice with vitiligo at injection site). Furthermore, more survivors from cytokine (IL12-MSA+MSA-IL2 or IL12-MSA-Lumican+Lumican-MSA-IL2) and anti-PD-1 treatment compared to survivors from IL12-MSA-Lumican+Lumican-MSA-IL2 treatment in the absence of anti-PD-1 treatment were protected against a subsequent tumor re-challenge with B16-F10 tumor cells. While 4/4 mice treated with Lumican-MSA cytokines+anti-PD-1 and 2/2 mice treated with MSA cytokines+anti-PD-1 rejected re-challenge tumors, only 1/3 mice treated with Lumican-MSA cytokines only rejected re-challenge.

[0770] These results demonstrate treatment of tumor-bearing mice with a combination of anti-PD-1, IL12-MSA-Lumican, and Lumican-MSA-IL2 increased the occurrence of treatment-induced vitiligo and effective immunological memory thus demonstrating a synergistic effect in enhancing T cell responses generated from localized IL-2 and IL-12 treatment.

### Example 13: Synergistic Effect of Collagen-Binding IL-2 and IL-12 Fusion Proteins and Anti-PD-1 Antibody Combination in Mouse Mammary and Colon Carcinoma Tumor Models

[0771] The anti-tumor effect(s) of a combinations of collagen-binding IL-2 and IL-12 fusion proteins with an anti-PD-1 antibody were further assessed in an EMT6 mammary carcinoma model. Briefly, 1×10⁶ EMT6 mouse mammary carcinoma cells (ATCC) or 1×10⁶ MC38 mouse colon carcinoma cells (National Cancer Institute, Bethesda, Md.) were resuspended in 50 μL of sterile PBS were injected subcutaneously into the right flanks of C57BL/6 female mice on day 0. EMT6 tumor-bearing mice were treated with Lumican-MSA-IL2+IL12-MSA-Lumican (i.tu.), anti-PD-1 antibody alone (i.p., 200 μg/dose) or anti-PD-1 antibody in combination with Lumican-MSA-IL2 and IL12-MSA-Lumican (i.tu) at dosages as described in Example 10 on day 5, day 11 and day 17. MC38 tumor-bearing mice were treated with a combination of Lumican-MSA-IL2+IL12-MSA-Lumican (i.tu.), anti-PD-1 antibody alone (i.p., 200 μg/dose) or in combination with Lumican-MSA-IL2+IL12-MSA-Lumican (i.tu.) at dosages as described in Example 10 on day 5, day 11 and day 17. For each tumor model, tumor area (mm²) and percent survival was monitored over time and is shown in FIG. 10A-10B. Survival statistics determined by log-rank Mantel-Cox test.

[0772] As shown in FIG. 10A, treatment of mice bearing EMT6 mammary carcinoma tumors with an anti-PD-1 antibody in combination with Lumican-MSA-IL2 and IL12-MSA-Lumican resulted in resolution of tumor lesions (as indicated by absence of measurable tumor area) and increase survival to a greater extent than treatment of tumor-bearing mice with anti-PD-1 antibody alone.

[0773] As shown in FIG. 10B, treatment of mice bearing MC38 colon carcinoma tumors with an anti-PD-1 antibody in combination with Lumican-MSA-IL2 and IL12-MSA-Lumican resulted in a decrease in tumor area and increased survival to a greater extent than treatment of tumor-bearing mice with anti-PD-1 antibody alone or with the IL12-MSA-Lumican+Lumican-MSA-IL2 combination alone.

[0774] These results show that treatment of tumor-bearing mice with an anti-PD-1 antibody in combination with IL12-MSA-Lumican+Lumican-MSA-IL2 results in a synergistic anti-tumor effect in both EMT6 mammary carcinoma and MC38 colon carcinoma models.

### Example 14: Synergistic Effect of Collagen-Binding IL-12 Fusion Protein and Cancer Vaccine in a Mouse Melanoma Tumor Model

[0775] To further evaluate the ability of a collagen-binding IL-12 fusion protein to synergistically potentiate anti-tumor treatments, the anti-tumor effect(s) of the collagen-binding IL-12 fusion protein IL12-MSA-Lumican in combination with a cancer vaccine was assessed in an B16-F10 mouse melanoma model. Briefly, 1×10⁶ B16-F10 cells (ATCC), resuspended in 50 μL of sterile PBS, were inoculated subcutaneously into the right flank of 6-8 week old C57BL/6 female mice on day 0. A cancer vaccine, comprising 90 μg of a lymph node-targeting moiety fused to peptides derived from B16-F10-associated antigens TYRP-1 and a modified gp100 peptide (EGP) and 50 g of cyclic dinucleotides adjuvants (Invivogen), was administered subcutaneously at the base of the tail with a prime dose on day 5 and boost dose on day 11 and day 17. Subcutaneous administration of the cyclic dinucleotide adjuvant and the cancer vaccine was evaluated for priming of an antigen-specific CD8 T cell response. Briefly, peripheral blood was collected on day 16 and stimulated for 6 hours with peptide antigens Trp1 and EGP. Brefeldin A was included for the final 4 hours of incubation. Peripheral blood cells were subsequently stained for surface markers and intracellular IFNγ and analyzed by flow cytometry. The percentage of IFNγ⁺ cells among live CD45⁺ CD3⁺ CD8⁺ T cells was evaluated. Vaccination alone or in combination with IL12-MSA-Lumican improved priming of antigen-specific CD8 T cells (data not shown).

[0776] Weight change from baseline of each mouse, tumor area, and survival of mice treated with intratumoral (i.tu.) injections of PBS (n=12) or IL-12 (n=10 for IL12-MSA; n=10 for IL12-MSA-Lumican), or vaccine (n=7) alone, or vaccine and IL12 (n=7 for IL12-MSA; n=7 for IL12-MSA-Lumican) on days 5, 11, and 17 were monitored over time (FIG. 11, left to right).

[0777] As shown in FIG. 11, vaccination alone did not affect weight relative to mice treated with PBS (left panel), modestly delayed B16F10 tumor growth (middle panel), and modestly increased survival of mice (right panel). In contrast, co-administration of the cancer vaccine with IL-12, using either IL12-MSA or IL12-MSA-Lumican, resulted in a synergistic reduction in tumor growth (middle panel) and increase in survival (right panel). The cancer vaccine administered in combination with IL12-MSA-Lumican extended survival longer than combination with IL12-MSA. Additionally, the vaccine with IL12-MSA lead to treatment-induced weight loss that was undetected with IL12-MSA-Lumican (right panel).

[0778] These results demonstrate that administration of a cancer vaccine in combination with collagen anchored IL-12 (IL12-MSA-lumican) to tumor-bearing mice results in a synergistic anti-tumor effect, decreasing tumor growth and increasing percent survival to a greater extent that administration of the cancer vaccine or IL12-MSA-lumican alone. These results show that intratumoral collagen-anchoring of a cytokine (e.g., IL-12) synergistically improves the tumor control of a cancer vaccine.

### Example 15: Synergistic Effect of Collagen-Binding IL12 Fusion Protein and CAR-T Cells in a Mouse Melanoma Tumor Model

[0779] To further evaluate the ability of a collagen-binding IL-12 fusion protein to synergistically potentiate anti-tumor treatments, the anti-tumor effect(s) of the collagen-binding IL-12 fusion protein IL12-MSA-Lumican in combination with CAR-T cells was assessed in an B16-F10 mouse melanoma model. Briefly, 0.5×10⁶ B16-F10 cells (ATCC), resuspended in 50 μL of sterile PBS, were inoculated subcutaneously into the right flank of 6-8 week old C57BL/6 female mice on day 0. B16F10-specific CAR-T cells were generated by transducing CD3+ splenocytes to express a CAR composed of single-chain variable fragment (scFv) of TA99 fused to costimulatory CD28 and CD3 ζ signaling domains. To ensure CAR-T cell engraftment, all mice were preconditioned with total body irradiation the day prior to a bolus injection of 10 million CAR-T cells intravenously (i.v.). Weight change from baseline, tumor area, and survival of mice treated with intratumoral (i.tu.) injections of PBS (n=9) or IL-12 (n=6 for IL12-MSA; n=5 for IL12-MSA-Lumican), or CAR-T (n=12) alone, or CAR-T and IL12 (n=7 for IL12-MSA; n=5 for IL12-MSA-Lumican) on days 5 and 11 were monitored over time (FIG. 12, left to right).

[0780] As shown in FIG. 12, treatment with CAR-T cells or IL12-MSA-Lumican (2.3 ug/dose) alone decreased tumor area (middle panel) and increased survival (right panel). However, administration of a combination of CAR-T cells and IL12-MSA-Lumican to tumor-bearing mice resulted in durable tumor regression, reducing tumor area and increasing survival to a greater extent that treatment with either CAR-T cells or IL12-MSA-Lumican alone. Treatment with CAR-T cells in combination with IL12-MSA also resulted in tumor regression and modest improvement in survival. However, the combination treatment demonstrated significant toxicity as shown by the large reduction in animal body weight loss following treatment. Such toxicity was not observed for the combination of CAR-T cells and IL-12-MSA-lumican.

[0781] These results demonstrate that administration of tumor-antigen specific CAR-T cells in combination with collagen anchored IL-12 (IL12-MSA-lumican) to tumor-bearing mice results in a synergistic anti-tumor effect, decreasing tumor growth and increasing percent survival to a greater extent that administration of the CAR-T cells or IL12-MSA-lumican alone. These results show that intratumoral collagen-anchoring of a cytokine (e.g., IL-12) synergistically improves the tumor control of tumor-antigen specific CAR-T cells.

### Example 16: Neoadjuvant Administration of a Collagen-Binding IL-12 Fusion Protein in Combination with PD-1 Checkpoint Blockade Prevents Metastatic Recurrence in a Mouse Breast Tumor Resection Model

[0782] To further evaluate the ability of a collagen-binding IL-12 fusion protein to synergistically potentiate anti-tumor treatments, the anti-tumor effect(s) of the collagen-binding IL-12 fusion protein IL12-MSA-Lumican in combination with an anti-PD-1 antibody (clone 29F.1A12, BioXCell) was assessed in an 4T1 mouse breast tumor resection model and compared to scIL12 combined with anti-PD-1. Briefly, 0.5×10⁶ luciferase-expressing 4T1-Luc cells (MIT, Cambridge, Mass.), resuspended in 100 μL of sterile PBS, were injected into the mammary fat pad of 6-8 week old BALB/c female mice on day 0. Prior to surgical resection of primary lesions, mice were treated with IL12-MSA-Lumican or scIL12 intratumorally and anti-PD-1 systemically (neoadjuvant therapy). Neoadjuvant therapy (anti-PD-1, 200 μg/dose, administered i.p. +IL12-MSA-lumican, 4.6 μg/dose (30 pmol IL12/dose) or scIL12, 1.9 μg/dose (30 pmol IL12/dose)), administered i.tu.) was administered on day 7 and 13 and primary tumors were surgically excised on day 16. Post-operation mice were monitored by in vivo imaging (IVIS) for metastases. FIG. 13 shows total body weight change during neoadjuvant treatment (left panel), primary tumor growth and weight (middle panel) and percent survival (right panel) of mice treated with intratumoral (i.tu.) injections of IL-12 (n=5 for scIL12; n=5 for IL12-MSA-Lumican) and intraperitoneal (i.p.) injection of anti-PD-1 on day 7 and 13. Arrows indicate time of treatment and cross indicates time of surgery.

[0783] As shown in FIG. 13, the combination of either version of IL-12 (scIL12 or IL12-MSA-Lumican) and anti-PD-1 antibody was not overtly toxic based on the absence of weight loss (left panel). However, the neoadjuvant therapy with IL12-MSA-Lumican led to more primary tumor shrinkage than the non-anchoring version scIL-12 (middle panel). After surgery, mice were monitored for metastases by in vivo bioluminescence imaging. IL12-MSA-Lumican completely protected mice from metastatic growth while several mice treated with scIL-12 relapsed.

[0784] These results demonstrate that administration of anti-PD-1 antibody in combination with collagen anchored IL-12 (IL12-MSA-lumican) to tumor-bearing mice results in a synergistic anti-tumor effect, decreasing primary tumor growth and increasing percent survival after surgical resection of tumor to a greater extent that administration of the a combination of non-collagen-binding IL-12 (scIL12) and anti-PD-1 antibody. These results demonstrate that collagen-anchoring IL-12 in a neoadjuvant setting improves postoperative outcomes.

### Example 17: Collagen-Binding Chemokine Fusion Proteins Induce Immune Cell Migration and Tumor Infiltration

[0785] T cell infiltration is critical for durable anti-tumor immunity. A correlation exists between T-cell infiltration and tumor-cell derived expression of CCL3, CCL4, and CCL5. Spranger et al., (2015) Nature 523:231-235 (2015); Spranger et al. (2016) Proc Natl Acad Sci USA 113, E7759-E7768 (2016). CCL3 (MIP-1α) binds with high affinity to CCR1, and low affinity to CCR5 thereby mediating the recruitment of T cells, B cells and monocytes. CCL4 (MIP-1b) binds to CCR5 mediating general lymphocyte recruitment. CCL5 (RANTES) binds several chemokine receptors (CCR1, CCR3, CCR4, CCR5) and thereby attracts monocytes, T cells, eosinophils, and other immune cells. T-cell recruiting chemokines are also more prevalent in tumors undergoing productive immune-mediated regression. Liang et al., (2016) Proc Natl Acad Sci USA 113:5000-5005; Schlecker et al., (2012) J Immunol 189:5602-5611; Brewitz et al., (2017) Immunity 46:205-219; Kanegasaki et al., (2014) Cancer Res 74:5070-5078; Wittrup (2017) Trends Cancer Res 3:615-620.

[0786] To evaluate the ability to express collagen-binding chemokines in mammalian cells, three His-tagged collagen-binding cytokines comprising lumican fused to CCL3, CCL4 or CCL5 were transiently expressed in human embryonic kidney 293 (HEK293) cells. Briefly, HEK293 cells (at 1 million cells/mL density) were transfected with sterile-filtered plasmid DNA (1 mg per liter cell culture) using polyethylenimine (2 mg per liter cell culture) in OptiPro serum-free media (20 mL per liter cell culture) (Thermo Fisher). TA99 was purified using rProtein A Sepharose Fast Flow resin (GE Healthcare) as previously described (Zhu et al. 2015). His-tagged proteins were isolated from HEK293 supernatant using TALON Metal Affinity Resin (Takara Bio Inc.). Cytokine-fusion proteins were then further purified by size exclusion chromatrography using a HiLoad 16/600 Superdex 200 pg column on an AKTA FPLC system (GE Healthcare) that had been pretreated for 4 hours with 1 M NaOH to remove endotoxin and subsequently equilibrated in sterile PBS (Corning). Following purification, all proteins were buffer exchanged into sterile PBS (Corning), 0.2 micron sterile-filtered (Pall Corporation) and confirmed to contain minimal levels of endotoxin (<0.1 EU per injection) using an chromogenic LAL assay (Lonza). To confirm their molecular weights, proteins were run alongside a Novex Prestained Sharp Protein Ladder on a 4-12% NuPAGE Bis-Tris protein gel (Life Technologies) with 1% MES running buffer. The relative expression levels of the His-tagged collagen-binding fusion proteins in the resulting eluates was evaluated by SDS-PAGE (not shown).

[0787] Transient expression of Lumican, Lumican D213A (SEQ ID NO: 125), Lumican-Gluc, Lumican-CCL3 (SEQ ID NO: 153), Lumican-CCL4 (SEQ ID NO: 156), and Lumican-CCL5 (SEQ ID NO: 160) in HEK293 cells was achieved, as determined by SDS-PAGE analysis showing by presence of protein staining at or near the respective expected molecular weight of each fusion protein.

[0788] These results demonstrate that collagen-binding fusion proteins comprising chemokines are able to express and be purified from mammalian cells.

[0789] To evaluate the ability of the lumican-chemokine fusion proteins generated as described above to induce inflammation (e.g., immune cell migration), an in vivo inflammatory peritonitis assay was performed as previously described (Proudfoot et al., (2003) Proc Natl Acad Sci USA 100:1885-1890. Briefly, the peritoneal cavity is lined by a collagen- and vasculature-rich mesothelium. When injected intraperitoneally, matrix-binding constructs (e.g. collagen-binding chemokine fusion proteins) adhere to this lining. In the case of lumican-chemokines, mesothelial localization can create a concentration gradient that mediates immune cell extravasation out of nearby blood vessels and into the peritoneal cavity. These infiltrates are retrieved by intraperitoneal lavage for ex vivo immunophenotyping. Accordingly, BALB/c mice were injected intraperitoneally with 1 nmol equivalent in 200 uL sterile PBS of either Lumican-Gluc, Lumican-CCL3, Lumican-CCL4, or Lumican-CCL5 and sacrificed 18 hours post-injection. The peritoneal cavity was washed three-times by gently massaging 5 mL of ice cold PBS in the cavity and the pooling the lavages. The collected cells were enumerated using Accuri Flow Cytometer.

[0790] Lumican-chemokine fusion proteins comprising CCL3, CCL4, or CCL5 were capable of mediating overall cell infiltration compared to an injection of Lumican-GLuc (data not shown). When infiltrates were immunophenotyped by surface marker staining, lavages from mice treated with Lumican-CCL3, Lumican-CCL4 or Lumican-CCL5 contained a greater abundance of macrophages, followed by neutrophils, NK cells, DCs, B cells, and T cells relative to lavages from mice treated with PBS or Lumican-Gluc (data not shown).

[0791] These results demonstrate that i.p. administration of collagen-binding chemokines (e.g., Lumican-CCL3, Lumican-CCL4 or Lumican-CCL5) induce immune cell migration, including T cells, into the peritoneal cavity of mice. These results suggest that intratumoral administration of lumican-chemokine fusion proteins will induce inflammation (e.g., immune cell infiltration), thereby mimicking immune-responding tumors.

[0792] To assess the therapeutic effect of inducing inflammation using lumican-chemokines in a tumor setting, Lumican-CCL3 (Lum CCL3) and Lumican-CCL5 (Lum CCL5) were tested in both the 4T1 breast tumor model and B16F10 melanoma model as described herein. Intratumoral treatment of tumor-bearing mice with Lumican-GLuc (20 ug/dose) or a combination of Lumican-CCL3 (5.5 ug/dose), Lumican-CCL4 (5.4 ug/dose) and Lumican-CCL5 (5.5 ug/dose) in the presence or absence of IFNα occurred on day 7 and day 13. Intraperitoneal administration of IFNα (50 ug/dose) occurred on day 9 and day 15.

[0793] As shown in FIG. 14A, intratumoral injection of a combination of Lumican-CCL3, Lumican-CCL4 and Lumican-CCL5 in the presence of systemic IFNα slightly delayed 4T1 tumor growth. The same treatment administered in B16F10 tumor-bearing mice conclusively showed that IFNα and lumican-chemokines, administered separately or in combination, delays growth equivalently (FIG. 14B). To determine if lumican-chemokines are directly impact the viability of tumor cells, increasing concentrations of fusion proteins Lumican-GLuc (Lum GLuc), Lumican-CCL3 (Lum CCL3), Lumican-CCL5 (Lum CCL5) were incubated with 4T1 cells or B16F10 in cell culture for 48 hours. After an additional 4 hour incubation with 10 uL of the cell proliferation detection reagent WST-1 (Sigma Aldrich), proliferation was measured by absorbance at 450 nm (reference 700 nm). As shown in FIGS. 14C and 14D, lumican cytokines had no effect on proliferation on 4T1 cells or B16F10 cells indicating any tumor growth delay observed in vivo arose from an immune-mediated and not from direct tumoricidal effect.

### Example 18: Synergistic Effect of Collagen-Binding CCL11 Chemokine Fusion Protein and Cancer Vaccine in a Mouse Melanoma Tumor Model

[0794] Eosinophils are known to secrete T-cell chemoattractants and normalize tumor vasculature thereby easing intratumoral infiltration. Carretero, et al., (2015) Nat Immunol 16:609-617. The chemokine CCL11 (eoxtaxin) is known to recruit eosinophils (Menzies-Gow et al., (2002) J Immunol 169(5):2712-2718). Accordingly, a CCL11-lumican fusion protein (SEQ ID NO: 172), in combination with the cancer vaccine described in Example 14 was tested for its ability to recruit eosinophils into a tumor and thereby mediate subsequent tumor control in the presence of systemic TNFα and IFNγ. Briefly, C57BL/6 mice were inoculated with 3×10⁵ B16F10 cells into the right flank on day 0. Vaccinations were administered subcutaneously (s.c.) at the tail base with a prime on day 5 and boosts on day 11 and 17. The vaccination was comprised of 90 ug of TTR-Trp1-EGP and 50 ug of cyclic di-nucleotide to prime a tumor-specific CD8+ T cell response. Intratumoral treatments with CCL11-lumican (5 ug/dose/mouse), TNFα (5.8 pmol/dose/mouse) and IFNγ (6.3 pmol/dose/mouse) were administered on days 11, 17, 23, and 29. Tumor area (mean+SD) was measured over time every other day

[0795] As shown in FIG. 15, treatment of tumor-bearing mice with CCL11-Lumican in combination with a B16F10-specific cancer vaccine TNFα and IFNγ decreased tumor area to a greater extent than the cancer vaccine alone or in combination with systemic TNFα and IFNγ.

### Example 19: Synergistic Effect of Collagen-Binding CCL11 Chemokine Fusion Protein and Cancer Vaccine in a Mouse Melanoma Tumor Model

[0796] To further evaluate the ability of a collagen-binding chemokine fusion protein to synergistically potentiate anti-tumor treatments, the anti-tumor effect(s) of the collagen-binding chemokine fusion protein CCL11-lumican in combination with MSA-IL2 (30 μg/dose) and a tumor-targeting antibody targeting Alpha-V class of integrins (2.5F-Fc; see Kwan et al., (2017) J Exp Med 215(9):10.1084/jem.20160831) was assessed in an B16-F10 mouse melanoma model. Briefly, 0.5×10⁶ B16-F10 cells (ATCC), resuspended in 50 μL of sterile PBS, were inoculated subcutaneously into the right flank of 6-8 week old C57BL/6 female mice on day 0. Tumor-targeting antibody 2.5F-Fc and MSA-IL2 were administered intraperitoneally (i.p.) on days 5, 11, and 17. Intratumoral treatments with CCL11-lumican (5 ug/dose/mouse) was given on days 5 and 11. Tumor growth was monitored over time every other day and is shown as individual tumor areas (mm²) in FIG. 16A.

[0797] As shown in FIG. 16B, treatment of tumor-bearing mice with CCL11-lumican in combination with tumor-targeting antibody 2.5F-Fc and MSA-IL-2 decreased tumor area to a greater extent than treatment without CCL11 (lumican alone).

[0798] Collectively, the results shown in Examples 17, 18 and 19 show that lumican-chemokines induce localized inflammation, recruiting immune cells to the site of local administration and that lumican-chemokines can be used in combination with other anti-tumor therapeutic modalities to potentiate their effects and provide synergistic tumor control.

### Example 20: Recombinant Expression of Collagen-Binding Antibody Fusion Proteins

[0799] To evaluate the ability to express collagen-binding antibody fusion proteins in mammalian cells, lumican fused to 5 different antibodies were generated (4420-Lumican (SEQ ID NOs: 142 and 143; anti-fluorescein), LOB12.3-Lumican (SEQ ID NOs: 146 and 147; anti-4-1BB), 3/23-Lumican (SEQ ID NOs: 184 and 185; anti-CD40), 2C11-Lumican (SEQ ID NOs: 150 and 151; anti-CD3), and OX86-Lumican (SEQ ID NOs: 148 and 149; anti-OX40) and transiently expressed in human embryonic kidney 293 (HEK293F) cells. All IgG-Lumican fusions were encoded on a single plasmid (data not shown). All IgG-lumican constructs were expressed as the light chain first (VL), with a murine kappa constant region (mK), followed by a T2A peptide (SEQ ID NO: 152; T2A) and finally the heavy chain (VH), with a murine IgG2c constant region (mIgG2c), fused to lumican (LUM) with a short linker ((G4S)₃). The T2A peptide causes the ribosome to skip bond formation between the last two residues of the peptide, allowing for expression of two different proteins within a single open reading frame. A furin cleavage site (F) was included upstream of the T2A peptide, allowing the T2A peptide to be removed from the end of the light chain. Additionally, a GSG linker (GSG) was included upstream of the T2A peptide, which has been shown to increase the cleavage efficiency of the T2A peptide (Chng et al., (2015) mAbs 7(2):403-412). Both the light chain and heavy chain comprise a leader sequence to ensure proper trafficking of the protein to the secretory pathway. All constructs were derived with LALA-PG effector function silencing mutations, which ablate both binding to Fc gamma receptors and binding of C1q (Lo et al., (2017) J Biol Chem 292:3900-3908).

[0800] Expression and purification of the anti-fluorescein antibody (4420) alone or fused to lumican was achieved as indicated by SDS-PAGE analysis revealing protein bands located at the predicted molecular weight under both reducing (R) and non-reducing conditions (NR) (data not shown). Similarly, expression of agonist IgG-lumican fusion proteins LOB12.3-Lumican (anti-4-1BB), 3/23-Lumican (anti-CD40), 2C11-Lumican (anti-CD3), and OX86-Lumican (anti-OX40) was achieved as indicated by SDS-PAGE analysis revealing protein bands located at the predicted molecular weight under both reducing (R) and non-reducing conditions (NR) (data not shown). All IgG-lumican fusion proteins were purified using recombinant protein A resin (rProtein A Sepharose, Fast Flow resin (GE Healthcare) according to the manufacturer's recommendations.

[0801] These results demonstrate that collagen-binding antibody fusion proteins (e.g., IgG-lumican) express in mammalian cells and that the collagen-binding polypeptide fusion does not affect purification.

### Example 21: Recombinant Collagen-Binding Antibody Fusion Proteins Bind Collagen In Vitro and are Retained Intratumorally In Vivo

[0802] To evaluate the ability of collagen-binding antibody fusion proteins to bind collagen, the IgG-lumican fusion proteins expressed and purified as described in Example 20 were tested for their ability to bind to collagen I-coated plates by ELISA. Briefly, collagen I (Gibco) coated 96 well-plates were blocked at room temperature for 1 hour with PBS+1% wt/vol bovine serum albumin (BSA)+0.05% wt/vol Tween-20 (PBSTA) and then incubated with various concentrations of lumican in PBSTA for 2 hours at room temperature. Wells were washed with PBSTA and then incubated with a horseradish peroxidase-conjugated goat anti-mouse IgG2c heavy chain (ab98722, Abcam) at a 1:1000 dilution (0.5 μg/ml final concentration) in PBSTA for 1 hour at room temperature. Wells were washed again with PBSTA and then 1-Step Ultra TMB-ELISA Substrate Solution (Thermo Fisher Scientific) was added for 10 mins followed by 1 M sulfuric acid to stop the chromogenic reaction. Absorbance at 450 nm (corrected with a reference absorbance at 570 nm) measured using an Infinite M1000 microplate reader (Tecan). Purified collagen-binding antibody fusion proteins LOB12.3-Lumican (anti-4-1BB), 3/23-Lumican (anti-CD40), 2C11-Lumican (anti-CD3), and OX86-Lumican (anti-OX40) were evaluated by ELISA on a collagen I-coated plate. As shown in FIG. 17A, all IgG-lumican fusion proteins retain the ability to bind collagen with similar measured affinities. These results demonstrate that lumican fused to the heavy chain of IgGs retains the ability to bind to collagen I.

[0803] The ability of the 4420-Lumican fusion protein and the 4420 antibody to be intratumorally retained in vivo was also evaluated. Both proteins were purified using size exclusion chromatography then labeled with NHS-AlexaFluor 647 (Thermo Fisher) according to the manufacturer's instructions. Six to eight week old female BALB/c mice were injected with 1×10⁶ 4T1 mammary carcinoma cells subcutaneously on day 0. On day 7 equimolar amounts of fluorescently-labeled 4420 antibody and 4420-Lumican were injected intratumorally into three mice each, along with three PBS control mice. Retention in the tumor was evaluated via measuring fluorescence on an IVIS Spectrum instrument (Perkin Elmer) at 0, 0.5, 1, 2, 4, 6, 12, 24, 48, 72, 96, 100, 124, and 148 hours (FIG. 17B).

[0804] As shown in FIG. 17B, the fluorescent signal from mice injected with the fluorescently-labeled 4420 antibody (4420 LALA-PG) decreased faster and to a greater extent than the signal from the 4420-lumican fusion protein (4420-LUM LALA-PG)

[0805] These results demonstrate that collagen-binding antibody fusion proteins (e.g., 4420-lumican fusion protein) are physically retained at the site of intratumoral injection over time. These results suggest that collagen-binding immunomodulatory molecules comprising a therapeutic antibody or antigen-binding fragment will exhibit intratumoral retention and limited systemic dissemination.

### Example 22: Recombinant Expression of Collagen-Binding IgG-Binding Fusion Proteins

[0806] As a strategy to localize virtually any IgG intraumorally without requiring regenerating the antibody as a direct lumican fusion, several different IgG binding proteins were fused to lumican. As with other lumican fusion proteins described herein, a mouse serum albumin (MSA) spacer was used to ensure that lumican-collagen binding did not interfere with the functionality of the IgG binding domain. Several different IgG binders were selected for screening, including a dimerized Z domain (one of the five IgG binding domains of protein A, herein referred to as “ZZ”) (Jendeberg et al., (1995) J Mol Recognit 8:270-278), a dimerized IgG binding domain of protein G (herein referred to as “SpG2”) (Jung et al., (2009) Anal Chem 81:936-942), an IgG binder isolated from a Sso7d yeast display library (Gera et al., (2011) J Mol Biol 409” 601-616), an IgG binder isolated from a Fibronectin type III domain (Fn3) yeast display library (Hackel et al., (2010) J Mol Biol 401:84-96), and two small peptides designed to bind IgG Fc regions (herein referred to as “Fc-III-4C” and “RRGW) (Gong et al., (2015) Bioconjug Chem 27:1569-1573; Tsai et al., (2014) Anal Chem 86:2931-2938). In addition, a lumican-MSA fusion to 4m5.3 was also cloned and expressed. 4m5.3 is an scFv with femtomolar binding affinity to fluorescein (Midelfort et al., (2004) J Mol Biol 343:685-701). Fluorescein can be conjugated to antibodies with a wide range of coupling strategies borrowed from the field of antibody drug conjugates (ADCs) (Carter & Lazar (2017) Nat Rev Drug Discov 17:197-223. Using 4m5.3-MSA-Lumican with fluorescently labeled antibodies serves as an alternative strategy for localizing IgGs to the tumor. This construct also serves as a generalized platform ably to tightly bind to and localize any fluorescein (or FITC) labeled protein or small molecule.

[0807] To evaluate the ability to express collagen-binding IgG-binding fusion proteins in mammalian cells, lumican fused to 8 different IgG-binding polypeptides were generated (Lumican-MSA-Fc-III-4C (SEQ ID NO: 136; 105.7 kDa), Lumican-MSA-Fn3 (SEQ ID NO: 137; 113.7 kDa), Lumican-MSA-SpG2 (SEQ ID NO: 138; 117.7 kDa), ZZ-MSA-Lumican (SEQ ID NO: 135; 117.5 kDa), WGRR-MSA-Lumican (SEQ ID NO: 140; 104.6 kDa), RRGW-MSA-Lumican (SEQ ID NO: 139; 104.6 kDa), Sso7d-MSA-Lumican (SEQ ID NO: 134; 111.5 kDa), and 4m5.3-MSA-Lumican (SEQ ID NO: 133; 132.2 kDa)) and transiently expressed in human embryonic kidney 293 (HEK293) cells. All lumican-IgG binding fusion proteins were His-tagged to facilitate purification from HEK293 lysates using TALON Metal Affinity Resin (Takara Bio Inc.) according to the manufacturer's instructions.

[0808] Expression and purification of all 8 lumican-IgG-binding fusion proteins was achieved as indicated by SDS-PAGE analysis revealing protein bands located at the predicted molecular weights under both reducing and non-reducing conditions (data not shown).

[0809] These results demonstrate that His-tagged collagen-binding IgG-binding fusion proteins (e.g., IgG-lumican) express in mammalian cells and are able to be purified.

### Example 23: Recombinant Collagen-Binding IgG-Binding Fusion Proteins Bind Collagen and IgG In Vitro

[0810] To evaluate the ability of collagen-binding IgG-binding fusion proteins to bind collagen, the lumican-IgG binding fusion proteins expressed and purified as described in Example 22 were tested for their ability to bind to collagen I- and collagen IV-coated plates by ELISA. Briefly, Nunc MaxiSorp flat bottom 96 well-plates (ThermoFisher) were coated overnight with mouse IgG2a isotype control antibodies (100 μL, 2.5 μg/mL, BioXCell C1.18.4) overnight at 4 C. Plates were then blocked at room temperature for 1 hour with PBS+1% wt/vol bovine serum albumin (BSA)+0.05% wt/vol Tween-20 (PBSTA) and then incubated with various concentrations of lumican in PBSTA for 2 hours at room temperature. Wells were washed with PBSTA and then incubated with a horseradish peroxidase-conjugated polyclonal anti-6×His (ab1187, Abcam) at a 1:2000 dilution (0.5 μg/ml final concentration) in PBSTA for 1 hour at room temperature. Wells were washed again with PBSTA and then 1-Step Ultra TMB-ELISA Substrate Solution (Thermo Fisher Scientific) was added for 10 mins followed by 1 M sulfuric acid to stop the chromogenic reaction. Absorbance at 450 nm (corrected with a reference absorbance at 570 nm) measured using an Infinite M1000 microplate reader (Tecan).

[0811] The purified lumican-IgG-binding fusion proteins Lumican-MSA-Fn3, Lumican-MSA-SpG2, ZZ-MSA-Lumican, and 4m5.3-MSA-Lumican were evaluated by ELISA on a collagen I-coated plate and a collagen IC-coated plate. Lumican was used as a comparator. As shown in FIG. 18A, all lumican-IgG-binding fusion proteins retain the ability to bind collagen with similar measured affinities. These results demonstrate that lumican fused to various IgG-binding polypeptides retains the ability to bind to collagen I and collagen IV.

[0812] The purified lumican-IgG-binding fusion proteins from Example 22 were tested for their ability to bind mouse IgG2a isotype control (Clone C1.18.4) as measured via ELISA. Briefly, an anti-His secondary antibody (Abcam, ab1187) conjugated to HRP was used to detect the IgG binder-lumican fusions, along with 1-step Ultra TMB-ELISA Substrate (Thermo Fischer).

[0813] As shown in FIG. 18B, all lumican-IgG-binding fusion proteins tested bind to mouse IgG2a, with a range of affinities (K_{D}).

[0814] Collectively, these results demonstrate that lumican-IgG-binding fusion protein bind to both collagen I and collagen IV and bind to IgGs. These results suggest that lumican-IgG-binding fusion proteins used in combination with IgG (e.g., therapeutic antibodies) would bind to both collagen and IgG and retain the IgG at the site of local administration.

### Example 24: Collagen-Binding Lumican is Retained in the Peritoneal Cavity Following Intraperitoneal Injection

[0815] The aforementioned Examples have demonstrated the utility of lumican to be retained intratumorally upon intratumoral (i.tu.) administration. The peritoneal cavity is also lined by a collagen-rich mesothelium. To evaluate the ability of lumican to be retained in the peritoneal cavity upon intraperitoneal (i.p) injection, BALB/c mice were injected intraperitoneally with either Gaussia Luciferase (GLuc; 20 μg/dose) alone or fused to Lumican (Lumican-Gluc; 40 μg/dose). Immediately after the injection, mice were imaged by in vivo fluorescence (epi-illumination, auto-exposure). 24 hours after the injection, mice were imaged again.

[0816] Lumican-GLuc is retained in the cavity however the GLuc alone rapidly diffuses in the peritoneum immediately following injection, leading to low initial signal (data not shown). Retention of Lumican was observed in the cavity 24 hours post-injection.

[0817] Tumors embedded on this lining or the omentum of the peritoneal cavity are also collagen-rich as well. To determine if i.p. administration of lumican will result in the accumulation on tumors liking the omentum, lumican fluorescently labeled with Alexa Fluor 647 was administered to mice having ovarian tumor microcolonies in the mouse omental tissue. Briefly, mice were injected with OVCA433 cells a human ovarian tumor cell line intraperitoneally and allowed to form microcolonies on the omentum for three weeks. 20 ug of labeled lumican was injected intraperitoneally. Excised omentum tissue was imaged by fluorescence microscopy. Labeled lumican was injected intraperitoneally in tumor-bearing mice. At 1 hour, 6 hours and 24 hours post-injection, omentums of mice were excised for imaging.

[0818] As shown in FIG. 19, when Lumican is intraperitoneally injected into mice bearing ovarian tumors lining the omentum, lumican preferentially accumulates at these tumor microcolonies. One hour post injection (left panel), the fluorescent signal from lumican (shown in yellow) was distributed uniformly. After 6 hours post-injection (middle) it was largely retained only around tumor microcolonies (shown in red) in the omentum (middle panel). Retention of the lumican was observed at 24 hours (right panel) around large tumors. These results demonstrate that i.p. administration of lumican can accumulate on collagen-rich locations and that lumican is amenable to several modes of administration including intraperitoneal injection.

### Example 25: Expression of Collagen-Binding IL-12 Fusion Proteins from Self-Replicating RNA in Mammalian Cells

[0819] To evaluate the expression of collagen-binding immunomodulatory molecules using RNA, self-replicating RNA molecules (replicons) encoding IL12-MSA and IL12-MSA-Lumican alone or fused to a fluorescent protein (mCherry) were tested for their ability to express in B16F10 mouse melanoma cells. The replicon used in this Example was derived from an alphavirus. The replicon was deleted of capsid structural proteins, but retains the non-structural proteins. The non-structural proteins correspond to the RNA-based RNA replication and RNA transcription. The Ab1c1 is a mutant replicon that exhibits more robust expression in vitro and in vivo compared to the wild-type replicon. The Ab1c1 replicon contains four mutations in the nsP2 and nsP3 genes that prolong replicon existence in cells and subgenomic transcription.

[0820] Briefly, 0.5×10⁶ B16F10 cells cultured in DMEM+10% FBS were transfected using NEOnN transfection reagents (electroporation) and the Ab1c1 replicons. The transfection efficiency was detected by FACS analyzer 24 hours later using optical settings to detect mCherry. Expression of IL-12 was quantified using cell supernatant 24 hours after the transfection and a commercial IL-12 ELISA (followed according to manufacturer's instructions). Expression of replicons was evaluated in B16F10 cells by determination of mCherry by flow cytometry (FIG. 20A). A commercial IL-12 ELISA was used to quantify IL-12 in B16F10 cell (FIG. 20B).

[0821] As shown in FIG. 20A, mCherry+B16F10 cells transfected with IL12-MSA-mCherry or IL12-MSA-Lumican-mCherry were observed by flow cytometry. The mCherry fluorescent protein is C-terminally encoded in these replications, therefore, detection of mCherry expression is indication of full-length expression of the encoded protein.

[0822] As shown in FIG. 20B, cell supernatants shows expression of these constructs from B16F10 cells transfected with IL-12-encoding replications, but not the Ab1c1-GIM control

[0823] These results demonstrate that delivery of Lumican-fusion proteins is achievable using modes of administration beyond injection, including replicon as shown.

### Example 26: Synergistic Effect of Collagen-Binding Cytokine Fusion Proteins, anti-PD-1 Antibody and TA99 in the Braf^{v600e}/Pten^{fl/fl} Mouse Model

[0824] To evaluate the effectiveness of lumican-cytokines in combination with anti-PD-1 blockade in a difficult-to-treat mouse melanoma model, the Braf^{V600E}/Pten^{fl/fl} genetically modified mouse model (GEMM) (Spranger et al., (2015) Nature 523:231-235; Momin et al., (2019) Sci. Transl. Med. 11, eeaw2614). Melanomas in this GEMM are induced by tamoxifen-regulated Cre expression in melanocytes, which drives the activation of oncogenic Braf^{V600E} and biallelic deletion of tumor suppressor Pten. Braf^{V600E}/Pten^{fl/fl} melanomas have fewer neoantigens and more heterogeneity than B16F10 tumors. This model has modest T cell infiltration, but tumor growth is only slightly slowed by dual checkpoint blockade of PD-1 and cytotoxic T-lymphocyte-associated protein 4 (CTLA-4). Id.

[0825] To determine if treatment with collagen-binding IL-2 and IL-12 alongside anti-PD-1 checkpoint blockade could reinvigorate the ongoing response and prime new T cell responses, as was observed in B16F10 tumors (FIGS. 9, 10, and 13), and if de novo T cell priming and any abscopal effects could be augmented by the inclusion of an immunogenic cell death-directing agent like the tumor-targeting antibody TA99, melanoma was induced by application of 4-hydroxytamoxifen on the right flank of Braf^{V600E}/Pten^{fl/fl} mice on day 0. After induction, flat black-pigment lesions are formed. The lesions will progress to large masses without therapy (data not shown). On day 25, the tumor-bearing mice are treated with PBS control (i.tu), with Lumican-MSA-IL2 (i.tu)+IL12-MSA-Lumican (i.tu)+TA99 (i.p.)+anti-PD-1 (i.p.), with Lumican-MSA-IL2 (i.tu)+IL12-MSA-Lumican (i.tu)+anti-PD-1 (i.p.), with MSA-IL2 (i.tu)+IL12-MSA (i.tu)+TA99 (i.p.)+anti-PD-1 (i.p.), or with MSA-IL2 (i.tu)+IL12-MSA(i.tu)+anti-PD-1 (i.p.) on days 25, 31, 37, 43, 49, 55, and 61.

[0826] As shown in FIG. 21A, Braf^{V600E}/Pten^{fl/fl} tumor-bearing mice treated with MSA-IL2 (i.tu)+IL12-MSA (i.tu)+TA99 (i.p.)+anti-PD-1 (i.p.) display inhibited lesion development.

[0827] As shown in FIG. 21B, the overall survival of Braf^{V600E}/Pten^{fl/fl} tumor-bearing mice treated with anti-PD-1 and collagen-binding IL-2 and IL-12 with or without TA99 is comparable. Thus, TA99 was not a necessary component for efficacy. These results affirm that IL-2, IL-12, and checkpoint blockade can be an effective tumor-agnostic combination treatment (FIGS. 9, 10 and 13).

[0828] Tumor control in this model could also be achieved using unanchored cytokines in lieu of collagen-anchoring cytokines, but at the cost of major and potentially lethal toxicity. One-third of the mice treated with IL12-MSA and MSA-IL2 were euthanized because of >20% loss of body weight, whereas no mice treated with IL12-MSA-Lumican and Lumican-MSA-IL2 succumbed to treatment-related toxicity (FIG. 21B). These results demonstrate that collagen binding fusion proteins can safely improve overall survival in this potent tumor-agnostic combination treatment (FIG. 21B).

### Example 27: LAIR Capacity for Binding to In Vivo Tumors

[0829] In this example, the capacity of LAIR to bind excised B16F10 tumors is measured. B16F10 tumors possess little detectable collagen and therefore serves as a lower estimate for LAIR's binding-capacity to a tumor. Briefly, C57/mice were inoculated with 1×10⁶ B16F10 cells injected subcutaneously into the left flank. Seven days later, tumors were carefully excised and detached from all remaining skin and subcutaneous fat. The excised tumors were then incubated in a gentle detergent (PBS+0.1% v/v Tween20) for 2 hours at 37° C. and then disaggregated/pushed through a 70 micron filter (FIG. 22A). As shown in FIG. 22B, the matrix comprises a third of the tumor's mass.

[0830] The filtered-fraction was devoid of extracellular matrix (i.e. cell fraction) while the fraction that did not pass the filter (i.e. matrix fraction) was matrix-rich, as confirmed by a hydroxyproline assay (MAK008-1KT, Millipore Sigma) performed according to the manufacturer's instructions (FIG. 22C). Hydroxyproline (4-hydroxyproline) is a non-proteinogenic amino acid formed by the post-translational hydroxylation of proline. Hydroxyproline is a major component of collagen, where it serves to stabilize the helical structure. Because hydroxyproline is largely restricted to collagen, the measurement of hydroxylproline levels is used as an indicator of collagen content. In this assay, hydroxyproline concentration is detected by the reaction of oxidized hydroxyproline with 4-(dimethylamino)benzaldehyde (DMAB), which results in development of a colorimetric (560 nm) product, proportional to the hydroxyproline present.

[0831] Each tumor's matrix fraction was then incubated in either an antigen-excess concentration (10 μM) or antigen-depleting concentration (10 μM) of AF647-labeled LAIR to quantitate LAIR binding sites in the matrix fraction. The fluorescence of the solution was monitored over time until steady-state is achieved. As shown in FIG. 22D, a decrease in fluorescence is observed with the 1 μM labeled LAIR, which corresponds to LAIR depletion from the bath upon binding to the collagen within the matrix fraction. A 20% decrease in solution concentration indicates 0.2 nmol uptake into the tumor matrix. Thus, a day 7 B16F10 tumor from a 1×10⁶ cell inoculum possesses 0.2 nmol of LAIR binding sites (FIG. 22D). This number correlates to the tumor's collagen content, as measured by hydroxyproline content (FIG. 22E). This experiment shows that LAIR is capable of binding B1610, as the B1610 matrix is collagen rich.

### Example 28: Collagen-Binding Fusion Proteins Using LAIR Imparts Similar Benefit Compared to Using Lumican

[0832] Like Lumican, LAIR can bind to collagen type I. A LAIR cytokine fusion protein was used to determine whether the collagen-binding fusion protein could potentiate the efficacy of a fused cytokine. A LAIR-cytokine fusion protein, LAIR-MSA-IL2 (SEQ ID NO: 186), was expressed and purified as described for Lumican-MSA-IL2 (Example 1). In the B16F10 melanoma mouse model conducted as described in Example 6, LAIR-MSA-IL2 is at least as efficacious as Lumican-MSA-IL2 in reducing tumor size (compare FIG. 3B to FIG. 23A). LAIR-MSA IL-2 also increased mice survival to levels comparable to survival in mice treated with a combination of Lumican-MSA-IL2 with intraperitoneal TA99 (compare FIGS. 3B and 3C to FIG. 23B). These results demonstrate that the collagen-binding strategy can be utilized using Lumican, LAIR or other collagen-binding proteins in their class.

### Example 29: LAIR-Engineering Yields Both Higher and Lower Affinity Collagen Binders

[0833] In this example, a yeast display platform is utilized to engineer higher and lower affinity variants of LAIR. Briefly, the mouse LAIR gene was amplified using error prone PCR to produce a library of LAIR mutants. RJY200 yeast (in-house modified version of EBY100, ATCC) are transformed with linearized pCTCON2 vector (41843, Addgene) and the error prone PCR product is collected, and subjected to an in vivo homologous recombination event to produce the final display plasmid. The pCTCON2 plasmid is formatted such that the LAIR mutants are fused to the Aga2 protein, which is bound to the yeast surface via a disulfide linkage to the membrane bound Aga1 protein. The LAIR gene is also followed by a c-myc tag, allowing one to probe for full expression of the mutant LAIR protein. Once expression is induced on the surface, yeast can be stained with labeled antigen and an antibody against the c-myc tag (ACMYC, Exalpha). LAIR expressing clones, as determined by c-myc staining intensity, can then be sorted for lower or higher affinity using FACS. (Chao et al., (2006) Nat. Protoc. 1(2):755-768).

[0834] A soluble collagen peptide mimic (CRP, collagen related peptide) was used as the antigen for the FACS assay as the LAIR natural ligand, collagen I, is not soluble. The protein sequence for this mimic is GCO-(GPO)₁₀-GCOG-NH2 (SEQ ID NO: 212) where O represents hydroxyproline amino acids. Similar to collagen I, these peptides spontaneously form helical structures in solution. A crosslinking reagent (cat #, company) was used to lock these helical structures in place. Following purification, the crosslinked peptide was used as our antigen (CRP-XL). Note that this peptide was used in both a biotinylated (CRP-XL-Biotin) and non-biotinylated (CRP-XL) format. (A detailed description on these peptides and their functionalization into a triple helix format can be obtained from CambCollab Inc.)

[0835] Two different strategies were used to isolate high and low affinity collagen-binding mutants. To select for low affinity mutants, equilibrium sorting was employed. In this strategy, LAIR expression was induced on the surface of the yeast library. The library was sequentially incubated with CPP-XL-biotin and chicken anti-c-myc (ACMYC, Exalpha), followed by secondary antibodies (streptavidin-AF647 (S21374, Thermo Fisher) and goat anti-chicken AF488 (A-1139, Invitrogen) until equilibrium was reached. Yeast that displayed weak or no AF647 signal but were positive for AF488, indicating that they were expressing LAIR but not binding to the collagen mimic, were sorted on a BD FACS Aria machine. After several rounds of sorting, the yeast were miniprepped to isolate the display plasmids, transformed into bacteria colonies, and submitted for sequencing. Prevalent clones (clones that appeared in sequencing at higher frequency than others (at least twice)) and/or clones that contained mutations in the collagen binding pocket were selected for downstream analysis. (Brondijk et al., (2010) Blood 115:1364-1373). These mutants were cloned into a mammalian expression vector, solubly expressed as fusions to mouse serum albumin (MSA), and tested for their ability to bind collagen I in an ELISA assays. As shown in FIGS. 24A-E and 25A-C, weakly binding clones (FIGS. 24F, 24D) contain mutations in the LAIR binding pocket. SEQ ID NOS: 187-192.

[0836] To isolate higher affinity mutants, a kinetic sort strategy was employed. After inducing expression, the yeast library was labeled with CRP-XL-biotin as described above. After equilibrium was reached, the yeast clones were washed and then incubated in 300:1 excess CRP-XL (non-biotinylated) for 3-5 days. Unlabeled CRP-XL will displace dissociated CRP-XL-biotin for LAIR binding (FIGS. 26C-D). Only the clones with the slowest off-rate, i.e., the highest affinity clones, will remain labeled. The yeast clones with highest AF647 signal were then sorted using FACS. After several rounds of sorting, high affinity clones were selected for downstream analysis in a competition assay. The isolated yeast clones were labeled with CRP-XL-biotin and then incubated with unlabeled CRP-XL. Samples were taken over time and analyzed for AF647 signal (FIGS. 26E-F). As shown in FIG. 26G, a high affinity the mutant LAIR, LAIR30.2.K1.B, has a slower off rate than WT LAIR. The mutations seen in this clone is located outside of the LAIR binding pocket (FIG. 26B, SEQ ID NO: 193). These results show that mutant LAIRs with a range of binding affinities to collagen could be isolated. These LAIR1 variants provide an opportunity to engineer immunomodulatory fusion proteins comprising therapeutic agents that are have different binding affinities to collagen-rich tumors.

Summary Sequence Table

| SEQ | | |
|---|---|---|
| ID | | |
| NO | Description | Sequence |
| 1 | IL-2 | APTSSSTKKTQLQLEHLLLDLQMILNGINNYKNPKLTRMLTFKFYMPKKATELKHL |
| | | QCLEEELKPLEEVLNLAQSKNFHLRPRDLISNINVIVLELKGSETTFMCEYADETA |
| | | TIVEFLNRWITFCQSIISTLT |
| 2 | Wild Type | IWELKKDVYVVELDWYPDAPGEMVVLTCDTPEEDGITWTLDQSSEVLGSGKTLTIQ |
| | IL12B without | VKEFGDAGQYTCHKGGEVLSHSLLLLHKKEDGIWSTDILKDQKEPKNKTFLRCEAK |
| | signal (IL12B) | NYSGRFTCWWLTT1STDLTFSVKSSRGSSDPQGVTCGAATLSAERVRGDNKEYEYS |
| | Amino Acids | VECQEDSACPAAEESLPIEVMVDAVHKLKYENYTSSFFIRDIIKPDPPKNLQLKPL |
| | | KNSRQVEVSWEYPDTWSTPHSYFSLTFCVQVQGKSKREKKDRVFTDKTSATVICRK |
| | | NASISVRAQDRYYSSSWSEWASVPCS |
| 3 | Wild Type | RNLPVATPDPGMFPCLHHSQNLLRAVSNMLQKARQTLEFYPCTSEEIDHEDITKDK |
| | IL12A without | TSTVEACLPLELTKNESCLNSRETSFITNGSCLASRKTSFMMALCLSSIYEDLKMY |
| | signal peptide | QVEFKTMNAKLLMDPKRQIFLDQNMLAVIDELMQALNFNSETVPQKSSLEEPDFYK |
| | Amino acids | TKIKLCILLHAFRIRAVTIDRVMSYLNAS |
| 4 | IL-15Ra | ITCPPPMSVEHADIWVKSYSLYSRERYICNSGFKRKAGTSSLTECVLNKATNVAHW |
| | | TTPSLKCIRDPALVHQRPAPPSTVTTAGVTPQPESLSPSGKEPAASSPSSNNTAAT |
| | | TAAIVPGSQLMPSKSPSTGTTEISSHESSHGTPSQTTAKNWELTASASHQPPGVYP |
| | | QGHSDTT |
| 5 | IL-15 | NWVNVISDLKKIEDLIQSMHIDATLYTESDVHPSCKVTAMKCFLLELQVISLESGD |
| | | ASIHDTVENLIILANNSLSSNGNVTESGCKECEELEEKNIKEFLQSFVHIVQMFIN |
| | | TS |
| 6 | TNF-alpha | VRSSSRTPSDKPVAHVVANPQAEGQLQWLNRRANALLANGVELRDNQLVVPSEGLY |
| | | LIYSQVLFKGQGCPSTHVLLTHTISRIAVSYQTKVNLLSAIKSPCQRETPEGAEAK |
| | | PWYEPIYLCGVFQLEKGDRLSAEINRPDYLDFAESCQVYFCIIAL |
| 7 | IFN-gamma | QDPYVKEAENLKKYFNAGHSDVADNGTLFLGILKNWKEESDRKIMQSQIVSFYFKL |
| | | FKNFKDDQSIQKSVETIKEDMNVKFFNSNKKKRDDFEKLTNYSVFDLNVQRKAIHE |
| | | LIQVMAELSPAAKTGKRKRSQMLFRG |
| 8 | IFN-alpha | CDLPQTHSLGSRRTLMLLAQMRKISLFSCLKDRHDFGFPQEEFGNQFQKAETIPVL |
| | | HEMIQQIFNLFSTKDSSAAWDETLLDKFYTELYQQLNDLEACVIQGVGVTETPLMK |
| | | EDSILAVRKYFQRITLYLKEKKYSPCAWEVVRAEIMRSFSLSTNLQESLRSKE |
| 9 | IL-21 | QGQDRHMIRMRQLIDIVDQLKNYVNDLVPEFLPAPEDVETNCEWSAFSCFQKAQLK |
| | | SANTGNNERIINVSIKKLKRKPPSTNAGRRQKHRLTCPSCDSYEKKPPKEFLERFK |
| | | SLLQKMIHQHLSSRTHGSEDS |
| 10 | IL-6 | LAPRRCPAQEVARGVLTSLPGDSVTLTCPGVEPEDNATVHWVLRKPAAGSHPSRWA |
| | | GMGRRLLLRSVQLHDSGNYSCYRAGRPAGTVHLLVDVPPEEPQLSCFRKSPLSNVV |
| | | CEWGPRSTPSLTTKAVLLVRKFQNSPAEDFQEPCQYSQESQKFSCQLAVPEGDSSF |
| | | YIVSMCVASSVGSKFSKTQTFQGCGILQPDPPANITVTAVARNPRWLSVTWQDPHS |
| | | WNSSFYRLRFELRYRAERSKTFTTWMVKDLQHHCVIHDAWSGLRHVVQLRAQEEFG |
| | | QGEWSEWSPEAMGTPWTESRSPPAENEVSTPMQALTTNKDDDNILFRDSANATSLP |
| | | VQDSSSVPLPTFLVAGGSLAFGTLLCIAIVLRFKKTWKLRALKEGKTSMHPPYSLG |
| | | QLVPERPRPTPVLVPLISPPVSPSSLGSDNTSSHNRPDARDPRSPYDISNTDYFFP |
| | | R |
| 11 | IL-5 | DLLPDEKISLLPPVNFTIKVTGLAQVLLQWKPNPDQEQRNVNLEYQVKINAPKEDD |
| | | YETRITESKCVTILHKGFSASVRTILQNDHSLLASSWASAELHAPPGSPGISIVNL |
| | | TCTTNTTEDNYSRLRSYQVSLHCTWLVGTDAPEDTQYFLYYRYGSWTEECQEYSKD |
| | | TLGRNIACWFPRTFILSKGRDWLAVLVNGSSKHSAIRPFDQLFALHAIDQINPPLN |
| | | VTAEIEGTRLSIQWEKPVSAFPIHCFDYEVKIHNTRNGYLQIEKLMTNAFISIIDD |
| | | LSKYDVQVRAAVSSMCREAGLWSEWSQPIYVGNDEHKPLREWFVIVIMATICFILL |
| | | ILSLICKICHLWIKLFPPIPAPKSNIKDLFVGGNYEKAGSSETEIEVICYIEKPGV |
| | | ETLEDSVF |
| 12 | IL-8 | AVLPRSAKELRCQCIKTYSKPFHPKFIKELRVIESGPHCANTEIIVKLSDGRELCL |
| | | DPKENWVQRWEKFLKRAENS |
| 13 | IL-7 | DCDIEGKDGKQYESVLMVSIDQLLDSMKEIGSNCLNNEFNFFKRHICDANKEGMFL |
| | | FRAARKLRQFLKMNSTGDFDLHLLKVSEGTTILLNCTGQVKGRKPAALGEAQPTKS |
| | | LEENKSLKEQKKLNDLCFLKRLLQEIKTCWNKILMGTKEH |
| 14 | IL-17A | GITIPRNPGCPNSEDKNFPRTVMVNLNIHNRNTNTNPKRSSDYYNRSTSPWNLHRN |
| | | EDPERYPSVIWEAKCRHLGCINADGNVDYHMNSVPIQQEILVLRREPPHCPNSFRL |
| | | EKILVSVGCTCVTPIVHHVA |
| 15 | IL-13alpha | RAVPGGSSPAWTQCQQLSQKLCTLAWSAHPLVGHMDLREEGDEETTNDVPHIQCGD |
| | | GCDPQGLRDNSQFCLQRIHQGLIFYEKLLGSDIFTGEPSLLPDSPVGQLHASLLGL |
| | | SQLLQPEGHHWETQQIPSLSPSQPWQRLLLRFKILRSLQAFVAVAARVFAHGAATL |
| | | SP |
| 16 | IL-18 | YFGKLESKLSVIRNLNDQVLFIDQGNRPLFEDMTDSDCRDNAPRTIFIISMYKDSQ |
| | | PRGMAVTISVKCEKISTLSCENKIISFKEMNPPDNIKDTKSDIIFFQRSVPGHDNK |
| | | MQFESSSYEGYFLACEKERDLFKLILKKEDELGDRSIMFTVQNED |
| 17 | IL-1alpha | SAPFSFLSNVKYNFMRIIKYEFILNDALNQSIIRANDQYLTAAALHNLDEAVKFDM |
| | | GAYKSSKDDAKITVILRISKTQLYVTAQDEDQPVLLKEMPEIPKTITGSETNLLFF |
| | | WETHGTKNYFTSVAHPNLFIATKQDYWVCLAGGPPSITDFQILENQA |
| 18 | IL-1beta | APVRSLNCTLRDSQQKSLVMSGPYELKALHLQGQDMEQQVVFSMSFVQGEESNDKI |
| | | PVALGLKEKNLYLSCVLKDDKPTLQLESVDPKNYPKKKMEKRFVFNKIEINNKLEF |
| | | ESAQFPNWYISTSQAENMPVFLGGTKGGQDITDFTMQFVSS |
| 19 | IL-4 | HKCDITLQEIIKTLNSLTEQKTLCTELTVTDIFAASKNTTEKETFCRAATVLRQFY |
| | | SHHEKDTRCLGATAQQFHRHKQLIRFLKRLDRNLWGLAGLNSCPVKEANQSTLENF |
| | | LERLKTIMREKYSKCSS |
| 20 | IL-3 | APMTQTTPLKTSWVNCSNMIDEIITHLKQPPLPLLDFNNLNGEDQDILMENNLRRP |
| | | NLEAFNRAVKSLQNASAIESILKNLLPCLPLATAAPTRHPIHIKDGDWNEFRRKLT |
| | | FYLKTLENAQAQQTTLSLAIF |
| 21 | IL-10 | SPGQGTQSENSCTHFPGNLPNMLRDLRDAFSRVKTFFQMKDQLDNLLLKESLLEDF |
| | | KGYLGCQALSEMIQFYLEEVMPQAENQDPDIKAHVNSLGENLKTLRLRLRRCHRFL |
| | | PCENKSKAVEQVKNAFNKLQEKGIYKAMSEFDIFINYIEAYMTMKIRN |
| 22 | IL-13 | PVPPSTALRELIEELVNITQNQKAPLCNGSMVWSINLTAGMYCAALESLINVSGCS |
| | | AIEKTQRMLSGFCPHKVSAGQFSSLHVRDTKIEVAQFVKDLLLHLKKLFREGRFN |
| 23 | IL-17a | GITIPRNPGCPNSEDKNFPRTVMVNLNIHNRNTNTNPKRSSDYYNRSTSPWNLHRN |
| | | EDPERYPSVIWEAKCRHLGCINADGNVDYHMNSVPIQQEILVLRREPPHCPNSFRL |
| | | EKILVSVGCTCVTPIVHHVA |
| 24 | IL-9 | QGCPTLAGILDINFLINKMQEDPASKCHCSANVTSCLCLGIPSDNCTRPCFSERLS |
| | | QMTNTTMQTRYPLIFSRVKKSVEVLKNNKCPYFSCEQPCNQTTAGNALTFLKSLLE |
| | | IFQKEKMRGMRGKI |
| 25 | IFN-gamma | QDPYVKEAENLKKYFNAGHSDVADNGTLFLGILKNWKEESDRKIMQSQIVSFYFKL |
| | | FKNFKDDQSIQKSVETIKEDMNVKFFNSNKKKRDDFEKLTNYSVTDLNVQRKAIHE |
| | | LIQVMAELSPAAKTGKRKRSQMLFRG |
| 26 | IFN-alpha | CDLPQTHSLGSRRTLMLLAQMRKISLFSCLKDRHDFGFPQEEFGNQFQKAETIPVL |
| | | HEMIQQIFNLFSTKDSSAAWDETLLDKFYTELYQQLNDLEACVIQGVGVTETPLMK |
| | | EDSILAVRKYFQRITLYLKEKKYSPCAWEVVRAEIMRSFSLSTNLQESLRSKE |
| 27 | GM-CSF | APARSPSPSTQPWEHVNAIQEARRLLNLSRDTAAEMNETVEVISEMFDLQEPTCLQ |
| | | TRLELYKQGLRGSLTKLKGPLTMMASHYKQHCPPTPETSCATQIITFESFKENLKD |
| | | FLLVIPFDCWEPVQE |
| 28 | FLT3L | TQDCSFQHSPISSDFAVKIRELSDYLLQDYPVTVASNLQDEELCGGLWRLVLAQRW |
| | | MERLKTVAGSKMQGLLERVNTEIHFVTKCAFQPPPSCLRFVQTNISRLLQETSEQL |
| | | VALKPWITRQNFSRCLELQCQPDSSTLPPPWSPRPLEATAPTAPQPPLLLLLLLPV |
| | | GLLLLAAAWCLHWQRTRRRTPRPGEQVPPVPSPQDLLLVEH |
| 29 | G-CSF | ATPLGPASSLPQSFLLKCLEQVRKIQGDGAALQEKLVSECATYKLCHPEELVLLGH |
| | | SLGIPWAPLSSCPSQALQLAGCLSQLHSGLFLYQGLLQALEGISPELGPTLDTLQL |
| | | DVADFATTIWQQMEELGMAPALQPTQGAMPAFASAFQRRAGGVLVASHLQSFLEVS |
| | | YRVLRHLAQP |
| 30 | LIF | SPLPITPVNATCAIRHPCHNNLMNQIRSQLAQLNGSANALFILYYTAQGEPFPNNL |
| | | DKLCGPNVTDFPPFHANGTEKAKLVELYRIWYLGTSLGNITRDQKILNPSALSLH |
| | | SKLNATADILRGLLSNVLCRLCSKYHVGHVDVTYGPDTSGKDVFQKKKLGCQLLGK |
| | | YKQIIAVLAQAF |
| 31 | M-CSF | EEVSEYCSHMIGSGHLQSLQRLIDSQMETSCQITFEFVDQEQLKDPVCYLKKAFLL |
| | | VQDIMEDTMRFRDNTPNAIAIVQLQELSLRLKSCFTKDYEEHDKACVRTFYETPLQ |
| | | LLEKVKNVFNETKNLLDKDWNIFSKNCNNSFAECSSQDWTKPDCNCLYPKAIPSS |
| | | DPASVSPHQPLAPSMAPVAGLTWEDSEGTEGSSLLPGEQPLHTVDPGSAKQRPPRS |
| | | TCQSFEPPETPWKDSTIGGSPQPRPSVGAFNPGMEDILDSAMGTNWVPEEASGEA |
| | | SEIPVPQGTELSPSRPGGGSMQTEPARPSNFLSASSPLPASAKGQQPADVTGTALP |
| | | RVGPVRPTGQDWNHTPQKTDHPSALLRDPPEPGSPRISSLRPQGLSNPSTLSAQPQ |
| | | LSRSHSSGSVLPLGELEGRRSTRDRRSPAEPEGGPASEGAARPLPRFNSVPLTDTG |
| | | HERQSEGSFSPQLQESVFHLLVPSVILVLLAVGGLLFYRWRRRSHQEPQRADSPLE |
| | | QPEGSPLTQDDRQVELPV |
| 32 | MIP-2 | APLATELRCQCLQTLQGIHLKNIQSVKVKSPGPHCAQTEVIATLKNGQKACLNPAS |
| | | PMVKKIIEKMLKNGKSN |
| 33 | MIP-1beta | APMGSDPPTACCFSYTARKLPRNFWDYYETSSLCSQPAWFQTKRSKQVCADPSE |
| | | SWVQEYVYDLELN |
| 34 | KP (aka CXCL1) | ASVATELRCQCLQTLQGIHPKNIQSVNVKSPGPHCAQTEVIATLKNGRKACLNPAS |
| | | PIVKKIIEKMLNSDKSN |
| 35 | MIG (aka CXCL9) | TPVVRKGRCSCISTNQGTIHLQSLKDLKQFAPSPSCEKIEIIATLKNGVQTCLNPD |
| | | SADVKELIKKWEKQVSQKKKQKNGKKHQKKKVLKVRKSQRSRQKKTT |
| 36 | IP-10 (CXCL10) | VPLSRTVRCTCISISNQPVNPRSLEKLEIIPASQFCPRVEIIATMKKKGEKRCLNP |
| | | ESKAIKNLLKAVSKERSKRSP |
| 37 | MCP-1 | QPDAINAPVTCCYNFTNRKISVQRLASYRRITSSKCPKEAVIFKTIVAKEICADPK |
| | | QKWVQDSMDHLDKQTQTPKT |
| 38 | Eotaxin | GPASVPTTCCFNLANRKIPLQRLESYRRITSGKCPQKAVIFKTKLAKDICADPKKK |
| | | WVQDSMKYLDQKSPTPKP |
| 39 | RANTES | SPYSSDTTPCCFAYIARPLPRAHIKEYFYTSGKCSNPAWFVTRKNRQVCANPEKK |
| | | WVREYINSLEMS |
| 40 | LIX | AGPAAAVLRELRCVCLQTTQGVHPKMISNLQVFAIGPQCSKVEWASLKNGKEICL |
| | | DPEAPFLKKVIQKILDGGNKEN |
| 41 | MIP-1alpha | SLAADTPTACCFSYTSRQIPQNFIADYFETSSQCSKPGVIFLTKRSRQVCADPSEE |
| | | WVQKYVSDLELSA |
| 42 | Human serum | MDMRVPAQLLGLLLLWLPGARCADAHKSEVAHRFKDLGEENFKALVLIAFAQYLQQ |
| | albumin | CPFEDHVKLVNEVGEFAKTCVADESAENCDKSLHTLFGDKLCTVATLRETYGEMAD |
| | amino acid | CCAKQEPERNECFLQHKDDNPNLPRLVRPEVDVMCTAFHDNEETFLKKYLYEIARR |
| | sequence) | HPYFYAPELLFFAKRYKAAFTECCQAADKAACLLPKLDELRDEGKASSAKQRLKCA |
| | | SLQKFGERAFKAWAVARLSQRFPKAEFAEVSKLVTDLTKVHTECCHGDLLECADDR |
| | | ADLAKYICENQDSISSKLKECCEKPLLEKSHCIAEVENDEMPADLPSLAADFVESK |
| | | DVCKNYAEAKDVFLGMFLYEYARRHPDYSVVLLLRLAKTYETTLEKCCAAADPHEC |
| | | YAKVFDEFKPLVEEPQNLIKQNCELFEQLGEYKFQNALLVRYTKKVPQVSTPTLVE |
| | | VSRNLGKVGSKCCKHPEAKRMPCAEDYLSVVLNQLCVLHEKTPVSDRVTKCCTESL |
| | | VNRRPCFSALEVDEGYVPKEFNAETFTFHADICTLSEKERQIKKQTALVELVKHKP |
| | | KATKEQLKAVMDDFAAFVEKCCKADDKETCFAEEGKKLVAASQAALGLGGGSAPTS |
| | | SSTKKTQLQLEHLLLDLQMILNGINNYKNPKLTRMLTFKFYMPKKATELKHLQCLE |
| | | EELKPLEEVLNLAQSKNFHLRPRDLISNINVIVLELKGSETTFMCEYADETATIVE |
| | | FLNRWITFCQSIISTLGGGGS |
| 43 | Mature HSA | DAHKSEVAHRFKDLGEENFKALVLIAFAQYLQQCPFEDHVKLVNEVTEFAKTCVAD |
| | (amino acid | ESAENCDKSLHTLFGDKLCTVATLRETYGEMADCCAKQEPERNECFLQHKDDNPNL |
| | sequence) | PRLVRPEVDVMCTAFHDNEETFLKKYLYEIARRHPYFYAPELLFFAKRYKAAFTEC |
| | | CQAADKAACLLPKLDELRDEGKASSAKQRLKCASLQKFGERAFKAWAVARLSQRFP |
| | | KAEFAEVSKLVTDLTKVHTECCHGDLLECADDRADLAKYICENQDSISSKLKECCE |
| | | KPLLEKSHCIAEVENDEMPADLPSLAADFVESKDVCKNYAEAKDVFLGMFLYEYAR |
| | | RHPDYSVVLLLRLAKTYETTLEKCCAAADPHECYAKVFDEFKPLVEEPQNLIKQNC |
| | | ELFEQLGEYKFQNALLVRYTKKVPQVSTPTLVEVSRNLGKVGSKCCKHPEAKRMPC |
| | | AEDYLSVVLNQLCVLHEKTPVSDRVTKCCTESLVNRRPCFSALEVDETYVPKEFNA |
| | | ETFTFHADICTLSEKERQIKKQTALVELVKHKPKATKEQLKAVMDDFAAFVEKCCK |
| | | ADDKETCFAEEGKKLVAASQAALGLGGGSAPTSSSTKKTQLQLEHLLLDLQMILNG |
| | | INNYKNPKLTRMLTFKFYMPKKATELKHLQCLEEELKPLEEVLNLAQSKNFHLRPR |
| | | DLISNINVIVLELKGSETTFMCEYADETATIVEFLNRWITFCQSIISTLTGGGS |
| 44 | PD-1 | MQIPQAPWPVVWAVLQLGWRPGWFLDSPDPWNPPTFFPALLVVTEGDNATFTCSFS |
| | | NTSESFVLNWYRMSPSNQTDKLAAFPEDRSQPGQDCRFRVTQLPNGRDFHMSVVRA |
| | | RRNDSGTYLCGAISLAPKAQIKESLRAELRVTERRAEVPTAHPSPSPRPAGQFQTL |
| | | VVGVVGGLLGSLVLLVWVLAVICSRAARGTIGARRTGQPLKEDPSAVPVFSVDYGE |
| | | LDFQWREKTPEPPVPCVPEQTEYATIVFPSGMGTSSPARRGSADGPRSAQPLRPED |
| | | GHCSWPL |
| 45 | PD-L-1 | MRIFAVFIFMTYWHLLNAFTVTVPKDLYVVEYGSNMTIECKFPVEKQLDLAALIVY |
| | | WEMEDKNIIQFVHGEEDLKVQHSSYRQRARLLKDQLSLGNAALQITDVKLQDAGVY |
| | | RCMISYGGADYKRITVKVNAPYNKINQRILVVDPVTSEHELTCQAEGYPKAEVIWT |
| | | SSDHQVLSGKTTTTNSKREEKLFNVTSTLRINTTTNEIFYCTFRRLDPEENHTAEL |
| | | VTPELPLAHPPNERTHLVTLGAILLC [symbol] LGVALTFIFR |
| | | LRKGRMMDVKKCGIQDTNSK [symbol] KQSDTHLEET |
| 46 | CTLA-4 | MACLGFQRHKAQLNLATRTWPCTLLFFLLFIPVFCKAMHVAQPAWLASS |
| | | RGIASFVCEYASPGKATEVRVTVLRQADSQVTEVCAATYM |
| | | MGNELTFLDDSICTGTSSGNQVNLTIQGLRAMDTGLYICKVELMYPPPYY |
| | | LGIGNGTQIY [symbol] VIDPEPCPDS [symbol] DFLLWILAAVSSGLFFYSFL |
| | | LYAVSLSKML [symbol] KKRSPLTTGVYVKMPPTEPE [symbol] CEKQFQPYFI [symbol] PIN |
| 47 | LAG3 | MWEAQFLGLLFLQPLWVAPVKPLQPGAEVPVVWAQEGAPAQLPCSPTIPLQDLSLL |
| | | RRAGVTWQHQPDSGPPAAAPGHPLAPGPHPAAPSSWGPRPRRYTVLSVGPGGLRSG |
| | | RLPLQPRVQLDERGRQRGDFSLWLRPAR [symbol] |
| | | RADAGEYRAAVHLRDRALSCRLRLRLGQASMTASPPGSLR [symbol] |
| | | ASDWVILNCSFSRPDRPASVHWFRNRGQGRVPVRESPHHHLAESFLFLPQVSPMDS |
| | | GPWGCILTYRDGFNVSIMYNLTVLGLEPPTPLTVYAGAGSRVGLPCRLPAGVGTRS |
| | | FLTAKWTPPGGGPDLLVTGDNGDFTLRL [symbol] EDVSQAQAGT [symbol] YTCHIHLQEQ [symbol] |
| | | QLNATVTLAI [symbol] ITVTPKSFGS [symbol] |
| | | PGSLGKLLCEVTPVSGQERFVWSSLDTPSQRSFSGPWLEAQEAQLLSQPWQCQLYQ |
| | | GERLLGAAVYFTEL [symbol] SSPGAQRSGR [symbol] APGALPAGHL [symbol] LLFLILGVLS [symbol] |
| | | LLLLVTGAFG [symbol] FHLWRRQWRPRRFSALEQGI [symbol] HPPQAQSKIE [symbol] ELEQEPEPEP |
| | | EPEPEPEPEP [symbol] EPEQL |
| 48 | TIM3 | MFSHLPFDCVLLLLLLLLTRSSEVEYRAEVGQNAYLPCFYTPAAPGNLVPVCWGKG |
| | | ACPVFECGNVVLRTDERDVNYWTSRYWLNGDFRKGDVSLTIENVTLADSGIYCCRI |
| | | QIPGIMNDEKFNLKLVIKPAKVTPAPTR [symbol] QRDFTAAFPR [symbol] MLTTRGHGPA [symbol] |
| | | ETQTLGSLPD [symbol] INLTQISTLA [symbol] |
| | | NELRDSRLANDLRDSGATIRGIYIGAGICAGLALALIFGALIFKWYSHSKEKIQNL |
| | | SLISLANLPPSGLANAVAEGIRSEENIYTIEENVYEVEEPNEYYCYVSSRQQPSQP |
| | | LGCRFAMP |
| 49 | B7-H3 | MLRRRGSPGMGVHVGAALGALWFCLTGALEVQVPEDPVVALVGTDATLCC [symbol] |
| | | SFSPEPGFSLQLNLIWQLT [symbol] DTKQLVHSFA [symbol] EGQDQGSAYA [symbol] |
| | | NRTALFPDLLAQGNASLRLQRVRVADEGSFCFVSIRDFGSAAVSLQVAA [symbol] |
| | | PYSKPSMTLE [symbol] PNKDLRPGDT [symbol] VTITCSSYQG [symbol] YPEAEVFWQD [symbol] |
| | | GQGVPLTGNVTTSQMANEQGLFDVHSILRWLGANGTYSCLVRNPVLQQD [symbol] |
| | | AHSSVTITPQRSPTGAVEVQVPEDPVVALVGTDATLRCSF [symbol] |
| | | SPEPGFSLAQLNLIWQLTDTKQLVHSFTEGRDQGSAYANRTALFPDLLAQ [symbol] |
| | | GNASLRLQRV [symbol] RVADEGSFTC [symbol] FVSIRDFGSA [symbol] AVSLQVAAPY [symbol] |
| | | SKPSMTLEPNKDLRPGDTVTITCSSYRGYPEAEVFWQDGQGVPLTGNVTT [symbol] |
| | | SQMANEQGLFDVHSVLRVVLGANGTYSCLVRNPVLQQDAH [symbol] |
| | | GSVTITGQPMTFPPEALWVTVGLSVCLIALLVALAFVCWRKIKQSCEEEN [symbol] |
| | | AGAEDQDGEGEGSKTALQPLKHSDSKEDDGQEIA |
| 50 | B7-H4 | MASLGQILFWSIISIIIILAGAIALIIGFGISAFSMPEVNVDYNASSETLRCEAPR |
| | | WFPQPTVVWASQVDQGANFSEVSNTSFELNSENVTMKVVSVLYN [symbol] VTINNTYSCM |
| | | IENDIAKATGDIKVTESEIKRRSHLQLLNS [symbol] |
| | | KASLCVSSFFAISWALLPLSPYLMLK |
| 51 | TNF-alpha | GPQREEFPRDLSLISPLAQAVRSSSRTPSDKPVAHVVANPQAEGQLQWLNRRANAL |
| | extracellular | LANGVELRDNQLVVPSEGLYLIYSQVLFKGQGCPSTHVLLTHTISRIAVSYQTKVN |
| | domain | LLSAIKSPCQRETPEGAEAKPWYEPIYLGGVFQLEKGDRLSAEINRPDYLDFAESG |
| | | QVYFGIIAL |
| 52 | LIGHT | LQLHWRLGEMVTRLPDGPAGSWEQLIQERRSHEVNPAAHLTGANSSLTGSGGPLLW |
| | extracellular | ETQLGLAFLRGLSYHDGALVVTKAGYYYIYSKVQLGGVGCPLGLASTITHGLYKRT |
| | domain | PRYPEELELLVSQQSPCGRATSSSRVWWDSSFLGGVVHLEAGEKVVVRVLDERLVR |
| | | LRDGTRSYFGAFMV |
| 53 | LT-alpha | LPGVGLTPSAAQTARQHPKMHLAHSTLKPAAHLIGDPSKQNSLLWRANTDRAFLQD |
| | extracellular | GFSLSNNSLLVPTSGIYFVYSQVVFSGKAYSPKATSSPLYLAHEVQLFSSQYPFHV |
| | domain | PLLSSQKMVYPGLQEPWLHSMYHGAAFQLTQGDQLSTHTDGIPHLVLSPSTVFFGA |
| | | FAL |
| 54 | LT-beta | QDQGGLVTETADPGAQAQQGLGFQKLPEEEPETDLSPGLPAAHLIGAPLKGQGLGW |
| | extracellular | ETTKEQAFLTSGTQFSDAEGLALPQDGLYYLYCLVGYRGRAPPGGGDPQGRSVTLR |
| | domain | SSLYRAGGAYGPGTPELLLEGAETVTPVLDPARRQGYGPLWYTSVGFGGLVQLRRG |
| | | ERVYVNISHPDMVDFARGKTFFGAVMVG |
| 55 | BTLA | KESCDVQLYIKRQSEHSILAGDPFELECPVKYCANRPHVTWCKLNGTTCVKLEDRQ |
| | extracellular | TSWKEEKNISFFILHFEPVLPNDNGSYRCSANFQSNLIESHSTTLYVTDVKSASER |
| | domain | PSKDEMASRPWLLYR |
| 56 | CD160 | INITSSASQEGTRLNLICTVWHKKEEAEGFVVFLCKDRSGDCSPETSLKQLRLKRD |
| | extracellular | PGIDGVGEISSQLMFTISQVTPLHSGTYQCCARSQKSGIRLQGHFFSILFTETGNY |
| | domain | TVTGLKQRQHLEFSHNEGTLS |
| 57 | CD40L | MQKGDQNPQIAAHVISEASSKTTSVLQWAEKGYYTMSNNLVTLENGKQLTVKRQGL |
| | extracellular | YYIYAQVTFCSNREASSQAPFIASLCLKSPGRFERILLRAANTHSSAKPCGQQSIH |
| | domain | LGGVFELQPGASVFVNVTDPSQVSHGTGFTSFGLLKL |
| 58 | FasL | QIGHPSPPPEKKELRKVAHLTGKSNSRSMPLEWEDTYGIVLLSGVKYKKGGLVINE |
| | extracellular | TGLYFVYSKVYFRGQSCNNLPLSHKVYMRNSKYPQDLVMMEGKMMSYCTTGQMWAR |
| | domain | SSYLGAVFNLTSADHLYVNVSELSLVNFEESQTFFGLYKL |
| 59 | CD30L | FPQDRPFEDTCHGNPSHYYDKAVRRCCYRCPMGLFPTQQCPQRPTDCRKQCEPDYY |
| | extracellular | LDEADRCTACVTCSRDDLVEKTPCAWNSSRVCECRPGMFCSTSAVNSCARCFFHSV |
| | domain | CPAGMIVKFPGTAQKNTVCEPASPGVSPACASPENCKEPSSGTIPQAKPTPVSPAT |
| | | SSASTMPVRGGTRLAQEAASKLTRAPDSPSSVGRPSSDPGLSPTQPCPEGSGDCRK |
| | | QCEPDYYLDEAGRCTACVSCSRDDLVEKTPCAWNSSRTCECRPGMICATSATNSCA |
| | | RCVPYPICAAETVTKPQDMAEKDTTFEAPPLGTQPDCNPTPENGEAPASTSPTQSL |
| | | LVDSQASKTLPIPTSAPVALSSTGKPVLDAGPVLFWVILVLVVVVGSSAFLLCHRR |
| | | ACRKRIRQKLHLCYPVQTSQPKLELVDSRPRRSSTQLRSGASVTEPVAEERGLMSQ |
| | | PLMETCHSVGAAYLESLPLQDASPAGGPSSPRDLPEPRVSTEHTNNKIEKIYIMKA |
| | | DTVIVGTVKAELPEGRGLAGPAEPELEEELEADHTPHYPEQETEPPLGSCSDVMLS |
| | | VEEEGKEDPLPTAASGK |
| 60 | 4-1BBL | ACPWAVSGARASPGSAASPRLREGPELSPDDPAGLLDLRQGMFAQLVAQNVLLIDG |
| | extracellular | PLSWYSDPGLAGVSLTGGLSYKEDTKELVVAKAGVYYVFFQLELRRVVAGEGSGSV |
| | domain | SLALHLQPLRSAAGAAALALTVDLPPASSEARNSAFGFQGRLLHLSAGQRLGVHLH |
| | | TEARARHAWQLTQGATVLGLFRVTPEIPAGLPSPRSE |
| 61 | CD27L | ATPAPKSCPERHYWAQGKLCCQMCEPGTFLVKDCDQHRKAAQCDPCIPGVSFSPDH |
| | extracellular | HTRPHCESCRHCNSGLLVRNCTITANAECACRNGWQCRDKECTECDPLPNPSLTAR |
| | domain | SSQALSPHPQPTHLPYVSEMLEARTAGHMQTLADFRQLPARTLSTHWPPQRSLCSS |
| | | DFIR |
| 62 | OX40L | LHCVGDTYPSNDRCCHECRPGNGMVSRCSRSQNTVCRPCGPGFYNDVVSSKPCKPC |
| | extracellular | TWCNLRSGSERKQLCTATQDTVCRCRAGTQPLDSYKPGVDCAPCPPGHFSPGDNQA |
| | domain | CKPWTNCTLAGKHTLQPASNSSDAICEDRDPPATQPQETQGPPARPITVQPTEAWP |
| | | RYSQGPSTRPVEVPGGRA |
| 63 | TWEAK | SAPKGRKTRARRAIAAHYEVHPRPGQDGAQAGVDGTVSGWEEARINSSSPLRYNRQ |
| | extracellular | IGEFIVTRAGLYYLYCQVHFDEGKAVYLKLDLLVDGVLALRCLEEFSATAASSLGP |
| | domain | QLRLCQVSGLLALRPGSSLRIRTLPWAHLKAAPFLTYFGLFQVH |
| 64 | APRIL | AVLTQKQKKQHSVLHLVPINATSKDDSDVTEVMWQPALRRGRGLQAQGYGVRIQDA |
| | extracellular | GVYLLYSQVLFQDVTFTMGVVWSREGQGRQETLFRCIRSMPSHPDRAYNSCYSAGV |
| | domain | FHLHQGDILSVIIPRARAKLNLSPHGTFLGFVKL |
| 65 | BAFF | AVQGPEETVTQDCLQLIADSETPTIQKGSYTFVPWLLSFKRGSALEEKENKILVKE |
| | extracellular | TGYFFIYGQVLYTDKTYAMGHLIQRKKVHVFGDELSLVTLFRCIQNMPETLPNNSC |
| | domain | YSAGIAKLEEGDELQLAIPRENAQISLDGDVTFFGALKLL |
| 66 | RANKL | YFRAQMDPNRISEDGTHCIYRILRLHENADFQDTTLESQDTKLIPDSCRRIKQAFQ |
| | extracellular | GAVQKELQHIVGSQHIRAEKAMVDGSWLDLAKRSKLEAQPFAHLTINATDIPSGSH |
| | domain | KVSLSSWYHDRGWAKISNMTFSNGKLIVNQDGFYYLYANICFRHHETSGDLATEYL |
| | | QLMVYVTKTSIKIPSSHTLMKGGSTKYWSGNSEFHFYSINVGGFFKLRSGEEISIE |
| | | VSNPSLLDPDQDATYFGAFKVRDID |
| 67 | TRAIL | TNELKQMQDKYSKSGIACFLKEDDSYWDPNDEESMNSPCWQVKWQLRQLVRKMILR |
| | extracellular | TSEETISTVQEKQQNISPLVRERGPQRVAAHITGTRGRSNTLSSPNSKNEKALGRK |
| | domain | INSWESSRSGHSFLSNLHLRNGELVIHEKGFYYIYSQTYFRFQEEIKENTKNDKQM |
| | | VQYIYKYTSYPDPILLMKSARNSCWSKDAEYGLYSIYQGGIFELKENDRIFVSVTN |
| | | EHLIDMDHEASFFGAFLVG |
| 68 | EDA1 | ELRSELRRERGAESRLGGSGTPGTSGTLSSLGGLDPDSPITSHLGQPSPKQQPLEP |
| | extracellular | GEAALHSDSQDGHQMALLNFFFPDEKPYSEEESRRVRRNKRSKSNEGADGPVKNKK |
| | domain | KGKKAGPPGPNGPPGPPGPPGPQGPPGIPGIPGIPGTTVMGPPGPPGPPGPQGPPG |
| | | LQGPSGAADKAGTRENQPAVVHLQGQGSAIQVKNDLSGGVLNDWSRITMNPKVFKL |
| | | HPRSGELEVLVDGTYFIYSQVEVYYINFTDFASYEVVVDEKPFLQCTRSIETGKTN |
| | | YNTCYTAGVCLLKARQKIAVKMVHADISINMSKHTTFFGAIRLGEAPAS |
| 69 | EDA2 | [symbol] |
| | extracellular | ELRSELRRERGAESRLGGSGTPGTSGTLSSLGGLDPDSPITSHLGQPSPKQQPLEP |
| | domain | GEAALHSDSQDGHQGHQ |
| 70 | GITRL | QLETAKEPCMAKFGPLPSKWQMASSEPPCVNKVSDWKLEILQNGLYLIYGQVAPNA |
| | extracellular | NYNDVAPFEVRLYKNKDMIQTLTNKSKIQNVGGTYELHVGDTIDLIFNSEHQVLKN |
| | domain | NTYWGIILLANPQFIS |
| 71 | CD80 (B7-1) | VIHVTKEVKEVATLSCGHNVSVEELAQTRIYWQKEKKMVLTMMSGDMNIWPEYKNR |
| | extracellular | TIFDITNNLSIVILALRPSDEGTYECVVLKYEKDAFKREHLAEVTLSVKADFPTPS |
| | domain | ISDFEIPTSNIRRIICSTSGGFPEPHLSWLENGEELNAINTTVSQDPETELYAVSS |
| | | KLDFNMTTNHSFMCLIKYGHLRVNQTFNWNTTKQEHFPDN |
| 72 | CD86 (B7-2) | APLKIQAYFNETADLPCQFANSQNQSLSELVVFWQDQENLVLNEVYLGKEKFDSVH |
| | extracellular | SKYMGRTSFDSDSWTLRLHNLQIKDKGLYQCIIHHKKPTGMIRIHQMNSELSVLAN |
| | domain | FSQPEIVPISNITENVYINLTCSSIHGYPEPKKMSVLLRTKNSTIEYDGVMQKSQD |
| | | NVTELYDVSISLSVSFPDVTSNMTIFCILETDKTRLLSSPFSIELEDPQPPPDHIP |
| 73 | ICOSLG | DTQEKEVRAMVGSDVELSCACPEGSRFDLNDVYVYWQTSESKTVVTYHIPQNSSLE |
| | extracellular | NVDSRYRNRALMSPAGMLRGDFSLRLFNVTPQDEQKFHCLVLSQSLGFQEVLSVEV |
| | domain | TLHVAANFSVPVVSAPHSPSQDELTFTCTSINGYPRPNVYWINKTDNSLLDQALQN |
| | | DTVFLNMRGLYDVVSVLRIARTPSVNIGCCIENVLLQQNLTVGSQTGNDIGERDKI |
| | | TENPVSTGEKNAAT |
| 74 | MICA | EPHSLRYNLTVLSWDGSVQSGFLTEVHLDGQPFLRCDRQKCRAKPQGQWAEDVLGN |
| | extracellular | KTWDRETRDLTGNGKDLRMTLAHIKDQKEGLHSLQEIRVCEIHEDNSTRSSQHFYY |
| | domain | DGELFLSQNLETKEWTMPQSSRAQTLAMNVRNFLKEDAMKTKTHYHAMHADCLQEL |
| | | RRYLKSGVVLRRTVPPMVNVTRSEASEGNITVTCRASGFYPWNITLSWRQDGVSLS |
| | | HDTQQWGDVLPDGNGTYQTWVATRICQGEEQRFTCYMEHSGNHSTHPVPSGKVLVL |
| | | QSHW |
| 75 | MICB | AEPHSLRYNLMVLSQDESVQSGFLAEGHLDGQPFLRYDRQKRRAKPQGQWAEDVLG |
| | extracellular | AKTWDTETEDLTENGQDLRRTLTHIKDQKGGLHSLQEIRVCEIHEDSSTRGSRHFY |
| | domain | YDGELFLSQNLETQESTVPQSSRAQTLAMNVTNFWKEDAMKTKTHYRAMQADCLQK |
| | | LQRYLKSGVAIRRTVPPMVNVTCSEVSEGNITVTCRASSFYPRNITLTWRQDGVSL |
| | | SHNTQQWGDVLPDGNGTYQTWVATRIRQGEEQRFTCYMEHSGNHGTHPVPSGKVLV |
| | | LQSQRTD |
| 76 | ULBP1 | GWVDTHCLCYDFIITPKSRPEPQWCEVQGLVDERPFLHYDCVNHKAKAFASLGKKV |
| | extracellular | NVTKTWEEQTETLRDVVDFLKGQLLDIQVENLIPIEPLTLQARMSCEHEAHGHGRG |
| | domain | SWQFLFNGQKFLLFDSNNRKWTALHPGAKKMTEKWEKNRDVTMFFQKISLGDCKMW |
| | | LEEFLMYWEQMLDPTKPPSLAPG |
| 77 | ULBP2 | GRADPHSLCYDITVIPKFRPGPRWCAVQGQVDEKTFLHYDCGNKTVTPVSPLGKKL |
| | extracellular | NVTTAWKAQNPVLREVVDILTEQLRDIQLENYTPKEPLTLQARMSCEQKAEGHSSG |
| | domain | SWQFSFDGQIFLLFDSEKRMWTTVHPGARKMKEKVVENDKWAMSFHYFSMGDCIGW |
| | | LEDFLMGMDSTLEPSAGAPLAMS |
| 78 | ULBP3 | DAHSLWYNFTIIHLPRHGQQWCEVQSQVDQKNFLSYDCGSDKVLSMGHLEEQLYAT |
| | extracellular | DAWGKQLEMLREVGQRLRLELADTELEDFTPSGPLTLQVRMSCECEADGYIRGSWQ |
| | domain | FSFDGRKFLLFDSNNRKWTVVHAGARRMKEKWEKDSGLTTFFKMVSMRDCKSWLRD |
| | | FLMHRKKRLEPTAPPTMAPG |
| 79 | ULBP4 | HSLCFNFTIKSLSRPGQPWCEAQVFLNKNLFLQYNSDNNMVKPLGLLGKKVYATST |
| | extracellular | WGELTQTLGEVGRDLRMLLCDIKPQIKTSDPSTLQVEMFCQREAERCTGASWQFAT |
| | domain | NGEKSLLFDAMNMTWTVINHEASKIKETWKKDRGLEKYFRKLSKGDCDHWLREFLG |
| | | HWEAMPEPTVSPVNASDIHWSSSSLPD |
| 80 | ULBP5, | GLADPHSLCYDITVIPKFRPGPRWCAVQGQVDEKTFLHYDCGSKTVTPVSPLGKKL |
| | isoform 1 | NVTTAWKAQNPVLREVVDILTEQLLDIQLENYIPKEPLTLQARMSCEQKAEGHGSG |
| | extracellular | SWQLSFDGQIFLLFDSENRMWTTVHPGARKMKEKWENDKDMTMSFHYISMGDCTGW |
| | domain | LEDFLMGMDSTLEPSAGAPPTMSSG |
| 81 | ULBP5, | GLADPHSLCYDITVIPKFRPGPRWCAVQGQVDEKTFLHYDCGSKTVTPVSPLGKKL |
| | isoform 2 | NVTTAWKAQNPVLREVVDILTEQLLDIQLENYIPKEPLTLQARMSCEQKAEGHGSG |
| | extracellular | SWQLSFDGQIFLLFDSENRMWTTVHPGARKMKEKWENDKDMTMSFHYISMGDCTGW |
| | domain | LEDFLMGMDSTLEPSAGGTV |
| 82 | ULBP6 | RRDDPHSLCYDITVIPKFRPGPRWCAVQGQVDEKTFLHYDCGNKTVTPVSPLGKKL |
| | extracellular | NVTMAWKAQNPVLREVVDILTEQLLDIQLENYTPKEPLTLQARMSCEQKAEGHSSG |
| | domain | SWQFSIDGQTFLLFDSEKRMWTTVHPGARKMKEKWENDKDVAMSFHYISMGDCIGW |
| | | LEDFLMGMDSTLEPSAGAPLAMSSG |
| 83 | SLAMF1 | ASYGTGGRMMNCPKILRQLGSKVLLPLTYERINKSMNKSIHIVVTMAKSLENSVEN |
| | extracellular | KIVSLDPSEAGPPRYLGDRYKFYLENLTLGIRESRKEDEGWYLMTLEKNVSVQRFC |
| | domain | LQLRLYEQVSTPEIKVLNKTQENGTCTLILGCTVEKGDHVAYSWSEKAGTHPLNPA |
| | | NSSHLLSLTLGPQHADNIYICTVSNPISNNSQTFSPWPGCRTDPSETKP |
| 84 | SLAMF2 | QGHLVHMTVVSGSNVTLNISESLPENYKQLTWFYTFDQKIVEWDSRKSKYFESKFK |
| | extracellular | GRVRLDPQSGALYISKVQKEDNSTYIMRVLKKTGNEQEWKIKLQVLDPVPKPVIKI |
| | domain | EKIEDMDDNCYLKLSCVIPGESVNYTWYGDKRPFPKELQNSVLETTLMPHNYSRCY |
| | | TCQVSNSVSSKNGTVCLSPPCTLARS |
| 85 | SLAMF3 | KDSAPTVVSGILGGSVTLPLNISVDTEIENVIWIGPKNALAFARPKENVTIMVKSY |
| | extracellular | LGRLDITKWSYSLCISNLTLNDAGSYKAQINQRNFEVTTEEEFTLFVYEQLQEPQV |
| | domain | TMKSVKVSENFSCNITLMCSVKGAEKSVLYSWTPREPHASESNGGSILTVSRTPCD |
| | | PDLPYICTAQNPVSQRSSLPVHVGQFCTDPGASRGGTTGETVVGVLGEPVTLPLAL |
| | | PACRDTEKVVWLFNTSIISKEREEAATADPLIKSRDPYKNRVWVSSQDCSLKISQL |
| | | KIEDAGPYHAYVCSEASSVTSMTHVTLLIYRRLRKPKITWSLRHSEDGICRISLTC |
| | | SVEDGGNTVMYTWTPLQKEAWSQGESHLNVSWRSSENHPNLTCTASNPVSRSSHQ |
| | | FLSENICSGPERNTK |
| 86 | SLAMF4 | CQGSADHVVSISGVPLQLQPNSIQTKVDSIAWKKLLPSQNGFHHILKWENGSLPSN |
| | extracellular | TSNDRFSFIVKNLSLLIKAAQQQDSGLYCLEVTSISGKVQTATFQVFVFESLLPDK |
| | domain | VEKPRLQGQGKILDRGRCQVALSCLVSRDGNVSYAWYRGSKLIQTAGNLTYLDEEV |
| | | DINGTHTYTCNVSNPVSWESHTLNLTQDCQNAHQEFRFWP |
| 87 | SLAMF5 | KDSEIFTVNGILGESVTFPVNIQEPRQVKIIAWTSKTSVAYVTPGDSETAPVVTVT |
| | extracellular | HRNYYERIHALGPNYNLVISDLRMEDAGDYKADINTQADPYTTTKRYNLQIYRRLG |
| | domain | KPKITQSLMASVNSTCNVTLTCSVEKEEKNVTYNWSPLGEEGNVLQIFQTPEDQEL |
| | | TYTCTAQNPVSNNSDSISARQLCADIAMGFRTHHTG |
| 88 | SLAMF6 | QSSLTPLMVNGILGESVTLPLEFPAGEKVNFITWLFNETSLAFIVPHETKSPEIHV |
| | extracellular | TNPKQGKRLNFTQSYSLQLSNLKMEDTCSYRAQISTKTSAKLSSYTLRILRQLRNI |
| | domain | QVTNHSQLFQNMTCELHLTCSVEDADDNVSFRWEALGNTLSSQPNLTVSWDPRISS |
| | | EQDYTCIAENAVSNLSFSVSAQKLCEDVKIQYTDTKM |
| 89 | SLAMF7 | SGPVKELVGSVGGAVTFPLKSKVKQVDSIVWTFNTTPLVTIQPEGGTIIVTQNRNR |
| | extracellular | ERVDFPDGGYSLKLSKLKKNDSGIYYVGIYSSSLQQPSTQEYVLHVYEHLSKPKVT |
| | domain | MGLQSNKNGTCVTNLTCCMEHGEEDVIYTWKALGQAANESHNGSILPISWRWGESD |
| | | MTFICVARNPVSRNFSSPILARKLCEGAADDPDSSM |
| 90 | human alpha1 | MFSFVDLRLLLLLAATALLTHGQEEGQVEGQDEDIPPITCVQNGLRYHDRDVWKPE |
| | chain | PCRICVCDNGKVLCDDVICDETKNCPGAEVPEGECCPVCPDGSESPTDQETTGVEG |
| | precurson of | PKGDTGPRGPRGPAGPPGRDGIPGQPGLPGPPGPPGPPGPPGLGGNFAPQLSYGYD |
| | type I collagen | EKSTGGISVPGPMGPSGPRGLPGPPGAPGPQGFQGPPGEPGEPGASGPMGPRGPPG |
| | (NCBI | PPGKNGDDGEAGKPGRPGERGPPGPQGARGLPGTAGLPGMKGHRGFSGLDGAKGDA |
| | Reference | GPAGPKGEPGSPGENGAPGQMGPRGLPGERGRPGAPGPAGARGNDGATGAAGPPGP |
| | Sequence: | TGPAGPPGFPGAVGAKGEAGPQGPRGSEGPQGVRGEPGPPGPAGAAGPAGNPGADG |
| | NP_000079.2) | QPGAKGANGAPGIAGAPGFPGARGPSGPQGPGGPPGPKGNSGEPGAPGSKGDTGAK |
| | | GEPGPVGVQGPPGPAGEEGKRGARGEPGPTGLPGPPGERGGPGSRGFPGADGVAGP |
| | | KGPAGERGSPGPAGPKGSPGEAGRPGEAGLPGAKGLTGSPGSPGPDGKTGPPGPAG |
| | | QDGRPGPPGPPGARGQAGVMGFPGPKGAAGEPGKAGERGVPGPPGAVGPAGKDGEA |
| | | GAQGPPGPAGPAGERGEQGPAGSPGFQGLPGPAGPPGEAGKPGEQGVPGDLGAPGP |
| | | SGARGERGFPGERGVQGPPGPAGPRGANGAPGNDGAKGDAGAPGAPGSQGAPGLQG |
| | | MPGERGAAGLPGPKGDRGDAGPKGADGSPGKDGVRGLTGPIGPPGPAGAPGDKGES |
| | | GPSGPAGPTGARGAPGDRGEPGPPGPAGFAGPPGADGQPGAKGEPGDAGAKGDAGP |
| | | PGPAGPAGPPGPIGNVGAPGAKGARGSAGPPGATGFPGAAGRVGPPGPSGNAGPPG |
| | | PPGPAGKEGGKGPRGETGPAGRPGEVGPPGPPGPAGEKGSPGADGPAGAPGTPGPQ |
| | | GIAGQRGVVGLPGQRGERGFPGLPGPSGEPGKQGPSGASGERGPPGPMGPPGLAGP |
| | | PGESGREGAPGAEGSPGRDGSPGAKGDRGETGPAGPPGAPGAPGAPGPVGPAGKSG |
| | | DRGETGPAGPAGPVGPVGARGPAGPQGPRGDKGETGEQGDRGIKGHRGFSGLQGPP |
| | | GPPGSPGEQGPSGASGPAGPRGPPGSAGAPGKDGLNGLPGPIGPPGPRGRTGDAGP |
| | | VGPPGPPGPPGPPGPPSAGFDFSFLPQPPQEKAHDGGRYYRADDANVVRDRDLEVD |
| | | TTLKSLSQQIENIRSPEGSRKNPARTCRDLKMCHSDWKSGEYWIDPNQGCNLDAIK |
| | | VFCNMETGETCVYPTQPSVAQKNWYISKNPKDKRHVWFGESMTDGFQFEYGGQGSD |
| | | PADVAIQLTFLRLMSTEASQNITYHCKNSVAYMDQQTGNLKKALLLQGSNEIEIRA |
| | | EGNSRFTYSVTVDGCTSHTGAWGKTVIEYKTTKTSRLPIIDVAPLDVGAPDQEFGF |
| | | DVGPVCFL |
| 91 | human alpha2 | MLSFVDTRTLLLLAVTLCLATCQSLQEETVRKGPAGDRGPRGERGPPGPPGRDGED |
| | chain | GPTGPPGPPGPPGPPGLGGNFAAQYDGKGVGLGPGPMGLMGPRGPPGAAGAPGPQG |
| | precurson of | FQGPAGEPGEPGQTGPAGARGPAGPPGKAGEDGHPGKPGRPGERGVVGPQGARGFP |
| | type I collagen | GTPGLPGFKGIRGHNGLDGLKGQPGAPGVKGEPGAPGENGTPGQTGARGLPGERGR |
| | (NCBI | VGAPGPAGARGSDGSVGPVGPAGPIGSAGPPGFPGAPGPKGEIGAVGNAGPAGPAG |
| | Reference | PRGEVGLPGLSGPVGPPGNPGANGLTGAKGAAGLPGVAGAPGLPGPRGIPGPVGAA |
| | Sequence: | GATGARGLVGEPGPAGSKGESGNKGEPGSAGPQGPPGPSGEEGKRGPNGEAGSAGP |
| | NP_000080.2) | PGPPGLRGSPGSRGLPGADGRAGVMGPPGSRGASGPAGVRGPNGDAGRPGEPGLMG |
| | | PRGLPGSPGNIGPAGKEGPVGLPGIDGRPGPIGPAGARGEPGNIGFPGPKGPTGDP |
| | | GKNGDKGHAGLAGARGAPGPDGNNGAQGPPGPQGVQGGKGEQGPPGPPGFQGLPGP |
| | | SGPAGEVGKPGERGLHGEFGLPGPAGPRGERGPPGESGAAGPTGPIGSRGPSGPPG |
| | | PDGNKGEPGVVGAVGTAGPSGPSGLPGERGAAGIPGGKGEKGEPGLRGEIGNPGRD |
| | | GARGAPGAVGAPGPAGATGDRGEAGAAGPAGPAGPRGSPGERGEVGPAGPNGFAGP |
| | | AGAAGQPGAKGERGAKGPKGENGVVGPTGPVGAAGPAGPNGPPGPAGSRGDGGPPG |
| | | MTGFPGAAGRTGPPGPSGISGPPGPPGPAGKEGLRGPRGDQGPVGRTGEVGAVGPP |
| | | GFAGEKGPSGEAGTAGPPGTPGPQGLLGAPGILGLPGSRGERGLPGVAGAVGEPGP |
| | | LGIAGPPGARGPPGAVGSPGVNGAPGEAGRDGNPGNDGPPGRDGQPGHKGERGYPG |
| | | NIGPVGAAGAPGPHGPVGPAGKHGNRGETGPSGPVGPAGAVGPRGPSGPQGIRGDK |
| | | GEPGEKGPRCLPGLKGHNGLQGLPGIAGHHGDQGAPGSVGPAGPRGPAGPSGPAGK |
| | | DGRTGHPGTVGPAGIRGPQGHQGPAGPPGPPGPPGPPGVSGGGYDFGYDGDFYRAD |
| | | QPRSAPSLRPKDYEVDATLKSLNNQIETLLTPEGSRKNPARTCRDLRLSHPEWSSG |
| | | YYWIDPNQGCTMDAIKVYCDFSTGETCIRAQPENIPAKNWYRSSKDKKHVWLGETI |
| | | NAGSQFEYNVEGVTSKEMATQLAFMRLLANYASQNITYHCKNSIAYMDEETGNLKK |
| | | AVILQGSNDVELVAEGNSRFTYTVLVDGCSKKTNEWGKTIIEYKTNKPSRLPFLDI |
| | | APLDIGGADQEFFVDIGPVCFK |
| 92 | human alpha1 | MQGPEGPQGPPGQKGDTGEPGLPGTKGTRGPPGASGYPGNPGLPGIPGQDGPPGPP |
| | chain of type | GIPGCNGTKGERGPLGPPGLPGFAGNPGPPGLPGMKGDPGEILGHVPGMLLKGERG |
| | IV collagen | FPGIPGTPGPPGLPGLQGPVGPPGFTGPPGPPGPPGPPGEKGQMGLSFQGPKGDKG |
| | (NCBI | DQGVSGPPGVPGQAQVQEKGDFATKGEKGQKGEPGFQGMPGVGEKGEPGKPGPRGK |
| | Reference | PGKDGDKGEKGSPGFPGEPGYPGLIGRQGPQGEKGEAGPPGPPGIVIGTGPLGEKG |
| | Sequence: | ERGYPGTPGPRGEPGPKGFPGLPGQPGPPGLPVPGQAGAPGFPGERGEKGDRGFPG |
| | XP_011519350.1) | TSLPGPSGRDGLPGPPGSPGPPGQPGYTNGIVECQPGPPGDQGPPGIPGQPGFIGE |
| | | IGEKGQKGESCLICDIDGYRGPPGPQGPPGEIGFPGQPGAKGDRGLPGRDGVAGVP |
| | | GPQGTPGLIGQPGAKGEPGEFYFDLRLKGDKGDPGFPGQPGMPGRAGSPGRDGHPG |
| | | LPGPKGSPGSVGLKGERGPPGGVGFPGSRGDTGPPGPPGYGPAGPIGDKGQAGFPG |
| | | GPGSPGLPGPKGEPGKIVPLPGPPGAEGLPGSPGFPGPQGDRGFPGTPGRPGLPGE |
| | | KGAVGQPGIGFPGPPGPKGVDGLPGDMGPPGTPGRPGFNGLPGNPGVQGQKGEPGV |
| | | GLPGLKGLPGLPGIPGTPGEKGSIGVPGVPGEHGAIGPPGLQGIRGEPGPPGLPGS |
| | | VGSPGVPGIGPPGARGPPGGQGPPGLSGPPGIKGEKGFPGFPGLDMPGPKGDKGAQ |
| | | GLPGITGQSGLPGLPGQQGAPGIPGFPGSKGEMGVMGTPGQPGSPGPVGAPGLPGE |
| | | KGDHGFPGSSGPRGDPGLKGDKGDVGLPGKPGSMDKVDMGSMKGQKGDQGEKGQIG |
| | | PIGEKGSRGDPGTPGVPGKDGQAGQPGQPGPKGDPGISGTPGAPGLPGPKGSVGGM |
| | | GLPGTPGEKGVPGIPGPQGSPGLPGDKGAKGEKGQAGPPGIGIPGLRGEKGDQGIA |
| | | GFPGSPGEKGEKGSIGIPGMPGSPGLKGSPGSVGYPGSPGLPGEKGDKGLPGLDGI |
| | | PGVKGEAGLPGTPGPTGPAGQKGEPGSDGIPGSAGEKGEPGLPGRGFPGFPGAKGD |
| | | KGSKGEVGFPGLAGSPGIPGSKGEQGFMGPPGPQGQPGLPGSPGHATEGPKGDRGP |
| | | QGQPGLPGLPGPMGPPGLPGIDGVKGDKGNPGWPGAPGVPGPKGDPGFQGMPGIGG |
| | | SPGITGSKGDMGPPGVPGFQGPKGLPGLQGIKGDQGDQGVPGAKGLPGPPGPPGPY |
| | | DIIKGEPGLPGPEGPPGLKGLQGLPGPKGQQGVTGLVGIPGPPGIPGFDGAPGQKG |
| | | EMGPAGPTGPRGFPGPPGPDGLPGSMGPPGTPSVDHGFLVTRHSQTIDDPQCPSGT |
| | | KILYHGYSLLYVQGNERAHGQDLGTAGSCLRKFSTMPFLFCNINNVCNFASRNDYS |
| | | YWLSTPEPMPMSMAPITGENIRPFISRCAVCEAPAMVMAVHSQTIQIPPCPSGWSS |
| | | LWIGYSFVMHTSAGAEGSGQALASPGSCLEEFRSAPFIECHGRGTCNYYANAYSFW |
| | | LATIERSEMFKKPTPSTLKAGELRTHVSRCQVCMRRT |
| 93 | | MGRDQRAVAGPALRRWLLLGTVTVGFLAQSVLAGVKKFDVPCGGRDCSGGCQCYPE |
| | | KGGRGQPGPVGPQGYNGPPGLQGFPGLQGRKGDKGERGAPGVTGPKGDVGARGVSG |
| | | FPGADGIPGHPGQGGPRGRPGYDGCNGTQGDSGPQGPPGSEGFTGPPGPQGPKGQK |
| | | GEPYALPKEERDRYRGEPGEPGLVGFQGPPGRPGHVGQMGPVGAPGRPGPPGPPGP |
| | | KGQQGNRGLGFYGVKGEKGDVGQPGPNGIPSDTLHPIIAPTGVTFHPDQYKGEKGS |
| | | EGEPGIRGISLKGEEGIMGFPGLRGYPGLSGEKGSPGQKGSRGLDGYQGPDGPRGP |
| | | KGEAGDPGPPGLPAYSPHPSLAKGARGDPGFPGAQGEPGSQGEPGDPGLPGPPGLS |
| | | IGDGDQRRGLPGEMGPKGFIGDPGIPALYGGPPGPDGKRGPPGPPGLPGPPGPDGF |
| | | LFGLKGAKGRAGFPGLPGSPGARGPKGWKGDAGECRCTEGDEAIKGLPGLPGPKGF |
| | | AGINGEPGRKGDRGDPGQHGLPGFPGLKGVPGNIGAPGPKGAKGDSRTITTKGERG |
| | | QPGVPGVPGMKGDDGSPGRDGLDGFPGLPGPPGDGIKGPPGDPGYPGIPGTKGTPG |
| | | EMGPPGLGLPGLKGQRGFPGDAGLPGPPGFLGPPGPAGTPGQIDCDTDVKRAVGGD |
| | | RQEAIQPGCIGGPKGLPGLPGPPGPTGAKGLRGIPGFAGADGGPGPRGLPGDAGRE |
| | | GFPGPPGFIGPRGSKGAVGLPGPDGSPGPIGLPGPDGPPGERGLPGEVLGAQPGPR |
| | | GDAGVPGQPGLKGLPGDRGPPGFRGSQGMPGMPGLKGQPGLPGPSGQPGLYGPPGL |
| | | HGFPGAPGQEGPLGLPGIPGREGLPGDRGDPGDTGAPGPVGMKGLSGDRGDAGFTG |
| | | EQGHPGSPGFKGIDGMPGTPGLKGDRGSPGMDGFQGMPGLKGRPGFPGSKGEAGFF |
| | | GIPGLKGLAGEPGFKGSRGDPGPPGPPPVILPGMKDIKGEKGDEGPMGLKGYLGAK |
| | | GIQGMPGIPGLSGIPGLPGRPGHIKGVKGDIGVPGIPGLPGFPGVAGPPGITGFPG |
| | | FIGSRGDKGAPGRAGLYGEIGATGDFGDIGDTINLPGRPGLKGERGTTGIPGLKGF |
| | | FGEKGTEGDIGFPGITGVTGVQGPPGLKGQTGFPGLTGPPGSQGELGRIGLPGGKG |
| | | DDGWPGAPGLPGFPGLRGIRGLHGLPGTKGFPGSPGSDIHGDPGFPGPPGERGDPG |
| | | EANTLPGPVGVPGQKGDQGAPGERGPPGSPGLQGFPGITPPSNISGAPGDKGAPGI |
| | | FGLKGYRGPPGPPGSAALPGSKGDTGNPGAPGTPGTKGWAGDSGPQGRPGVFGLPG |
| | | EKGPRGEQGFMGNTGPTGAVGDRGPKGPKGDPGFPGAPGTVGAPGIAGIPQKIAVQ |
| | | PGTVGPQGRRGPPGAPGEMGPQGPPGEPGFRGAPGKAGPQGRGGVSAVPGFRGDEG |
| | | PIGHQGPIGQEGAPGRPGSPGLPGMPGRSVSIGYLLVKHSQTDQEPMCPVGMNKLW |
| | | SGYSLLYFEGQEKAHNQDLGLAGSCLARFSTMPFLYCNPGDVCYYASRNDKSYWLS |
| | | TTAPLPMMPVAEDEIKPYISRCSVCEAPAIAIAVHSQDVSIPHCPAGWRSLWIGYS |
| | | FLMHTAAGDEGGGQSLVSPGSCLEDFRATPFIECNGGRGTCHYYANKYSFWLTTIP |
| | | EQSFQGSPSADTLKAGLIRTHISRCQVCMKNL |
| 94 | human alpha3 | MSARTAPRPQVLLLPLLLVLLAAAPAASKGCVCKDKGQCFCDGAKGEKGEKGFPGP |
| | chain of type | PGSPGQKGFTGPEGLPGPQGPKGFPGLPGLTGSKGVRGISGLPGFSGSPGLPGTPG |
| | IV collagen | NTGPYGLVGVPGCSGSKGEQGFPGLPGTLGYPGIPGAAGLKGQKGAPAKEEDIELD |
| | (NCBI | AKGDPGLPGAPGPQGLPGPPGFPGPVGPPGPPGFFGFPGAMGPRGPKGHMGERVIG |
| | Reference | HKGERGVKGLTGPPGPPGTVIVTLTGPDNRTDLKGEKGDKGAMGEPGPPGPSGLPG |
| | Sequence: | ESYGSEKGAPGDPGLQGKPGKDGVPGFPGSEGVKGNRGFPGLMGEDGIKGQKGDIG |
| | NP_000082.2) | PPGFRGPTEYYDTYQEKGDEGTPGPPGPRGARGPQGPSGPPGVPGSPGSSRPGLRG |
| | | APGWPGLKGSKGERGRPGKDAMGTPGSPGCAGSPGLPGSPGPPGPPGDIVFRKGPP |
| | | GDHGLPGYLGSPGIPGVDGPKGEPGLLCTQCPYIPGPPGLPGLPGLHGVKGIPGRQ |
| | | GAAGLKGSPGSPGNTGLPGFPGFPGAQGDPGLKGEKGETLQPEGQVGVPGDPGLRG |
| | | QPGRKGLDGIPGTPGVKGLPGPKGELALSGEKGDQGPPGDPGSPGSPGPAGPAGPP |
| | | GYGPQGEPGLQGTQGVPGAPGPPGEAGPRGELSVSTPVPGPPGPPGPPGHPGPQGP |
| | | PGIPGSLGKCGDPGLPGPDGEPGIPGIGFPGPPGPKGDQGFPGTKGSLGCPGKMGE |
| | | PGLPGKPGLPGAKGEPAVAMPGGPGTPGFPGERGNSGEHGEIGLPGLPGLPGTPGN |
| | | EGLDGPRGDPGQPGPPGEQGPPGRCIEGPRGAQGLPGLNGLKGQQGRRGKTGPKGD |
| | | PGIPGLDRSGFPGETGSPGIPGHQGEMGPLGQRGYPGNPGILGPPGEDGVIGMMGF |
| | | PGAIGPPGPPGNPGTPGQRGSPGIPGVKGQRGTPGAKGEQGDKGNPGPSEISHVIG |
| | | DKGEPGLKGFAGNPGEKGNRGVPGMPGLKGLKGLPGPAGPPGPRGDLGSTGNPGEP |
| | | GLRGIPGSMGNMGMPGSKGKRGTLGFPGRAGRPGLPGIHGLQGDKGEPGYSEGTRP |
| | | GPPGPTGDPGLPGDMGKKGEMGQPGPPGHLGPAGPEGAPGSPGSPGLPGKPGPHGD |
| | | LGFKGIKGLLGPPGIRGPPGLPGFPGSPGPMGIRGDQGRDGIPGPAGEKGETGLLR |
| | | APPGPRGNPGAQGAKGDRGAPGFPGLPGRKGAMGDAGPRGPTGIEGFPGPPGLPGA |
| | | IIPGQTGNRGPPGSRGSPGAPGPPGPPGSHVIGIKGDKGSMGHPGPKGPPGTAGDM |
| | | GPPGRLGAPGTPGLPGPRGDPGFQGFPGVKGEKGNPGFLGSIGPPGPIGPKGPPGV |
| | | RGDPGTLKIISLPGSPGPPGTPGEPGMQGEPGPPGPPGNLGPCGPRGKPGKDGKPG |
| | | TPGPAGEKGNKGSKGEPGPAGSDGLPGLKGKRGDSGSPATWTTRGFVFTRHSQTTA |
| | | IPSCPEGTVPLYSGFSFLFVQGNQRAHGQDLGTLGSCLQRFTTMPFLFCNVNDVCN |
| | | FASRNDYSYWLSTPALMPMNMAPITGRALEPYISRCTVCEGPAIAIAVHSQTTDIP |
| | | PCPHGWISLWKGFSFIMFTSAGSEGTGQALASPGSCLEEFRASPFLECHGRGTCNY |
| | | YSNSYSFWLASLNPERMFRKPIPSTVKAGELEKIISRCQVCMKKRH |
| 95 | human alpha4 | MWSLHIVLMRCSFRLTKSLATGPWSLILILFSVQYVYGSGKKYIGPCGGRDCSVCH |
| | chain of type | CVPEKGSRGPPGPPGPQGPIGPLGAPGPIGLSGEKGMRGDRGPPGAAGDKGDKGPT |
| | IV collagen | GVPGFPGLDGIPGHPGPPGPRGKPGMSGHNGSRGDPGFPGGRGALGPGGPLGHPGE |
| | (NCBI | KGEKGNSVFILGAVKGIQGDRGDPGLPGLPGSWGAGGPAGPTGYPGEPGLVGPPGQ |
| | Reference | PGRPGLKGNPGVGVKGQMGDPGEVGQQGSPGPTLLVEPPDFCLYKGEKGIKGIPGM |
| | Sequence: | VGLPGPPGRKGESGIGAKGEKGIPGFPGPRGDPGSYGSPGFPGLKGELGLVGDPGL |
| | NP_000083.3) | FGLIGPKGDPGNRGHPGPPGVLVTPPLPLKGPPGDPGFPGRYGETGDVGPPGPPGL |
| | | LGRPGEACAGMIGPPGPQGFPGLPGLPGEAGIPGRPDSAPGKPGKPGSPGLPGAPG |
| | | LQGLPGSSVIYCSVGNPGPQGIKGKVGPPGGRGPKGEKGNEGLCACEPGPMGPPGP |
| | | PGLPGRQGSKGDLGLPGWLGTKGDPGPPGAEGPPGLPGKHGASGPPGNKGAKGDMV |
| | | VSRVKGHKGERGPDGPPGFPGQPGSHGRDGHAGEKGDPGPPGDHEDATPGGKGFPG |
| | | PLGPPGKAGPVGPPGLGFPGPPGERGHPGVPGHPGVRGPDGLKGQKGDTISCNVTY |
| | | PGRHGPPGFDGPPGPKGFPGPQGAPGLSGSDGHKGRPGTPGTAEIPGPPGFRGDMG |
| | | DPGFGGEKGSSPVGPPGPPGSPGVNGQKGIPGDPAFGHLGPPGKRGLSGVPGIKGP |
| | | RGDPGCPGAEGPAGIPGFLGLKGPKGREGHAGFPGVPGPPGHSCERGAPGIPGQPG |
| | | LPGYPGSPGAPGGKGQPGDVGPPGPAGMKGLPGLPGRPGAHGPPGLPGIPGPFGDD |
| | | GLPGPPGPKGPRGLPGFPGFPGERGKPGAEGCPGAKGEPGEKGMSGLPGDRGLRGA |
| | | KGAIGPPGDEGEMAIISQKGTPGEPGPPGDDGFPGERGDKGTPGMQGRRGEPGRYG |
| | | PPGFHRGEPGEKGQPGPPGPPGPPGSTGLRGFIGFPGLPGDQGEPGSPGPPGFSGI |
| | | DGARGPKGNKGDPASHFGPPGPKGEPGSPGCPGHFGASGEQGLPGIQGPRGSPGRP |
| | | GPPGSSGPPGCPGDHGMPGLRGQPGEMGDPGPRGLQGDPGIPGPPGIKGPSGSPGL |
| | | NGLHGLKGQKGTKGASGLHDVGPPGPVGIPGLKGERGDPGSPGISPPGPRGKKGPP |
| | | GPPGSSGPPGPAGATGRAPKDIPDPGPPGDQGPPGPDGPRGAPGPPGLPGSVDLLR |
| | | GEPGDCGLPGPPGPPGPPGPPGYKGFPGCDGKDGQKGPVGFPGPQGPHGFPGPPGE |
| | | KGLPGPPGRKGPTGLPGPRGEPGPPADVDDCPRIPGLPGAPGMRGPEGAMGLPGMR |
| | | GPSGPGCKGEPGLDGRRGVDGVPGSPGPPGRKGDTGEDGYPGGPGPPGPIGDPGPK |
| | | GFGPGYLGGFLLVLHSQTDQEPTCPLGMPRLWTGYSLLYLEGQEKAHNQDLGLAGS |
| | | CLPVFSTLPFAYCNIHQVCHYAQRNDRSYWLASAAPLPMMPLSEEAIRPYVSRCAV |
| | | CEAPAQAVAVHSQDQSIPPCPQTWRSLWIGYSFLMHTGAGDQGGGQALMSPGSCLE |
| | | DFRAAPFLECQGRQGTCHFFANKYSFWLTTVKADLQFSSAPAPDTLKESQAQRQKI |
| | | SRCQVCVKYS |
| 96 | human alpha5 | MEVDSGKTENRDWEGFCYSTSAYWKNLYDGLLACYGCSPGSKCDCSGIKGEKGERG |
| | chain of type | FPGLEGHPGLPGFPGPEGPPGPRGQKGDDGIPGPPGPKGIRGPPGLPGFPGTPGLP |
| | IV collagen | GMPGHDGAPGPQGIPGCNGTKGERGFPGSPGFPGLQGPPGPPGIPGMKGEPGSIIM |
| | (NCBI | SSLPGPKGNPGYPGPPGIQGLPGPTGIPGPIGPPGPPGLMGPPGPPGLPGPKGNMG |
| | Reference | LNFQGPKGEKGEQGLQGPPGPPGQISEQKRPIDVEFQKGDQGLPGDRGPPGPPGIR |
| | Sequence: | GPPGPPGGEKGEKGEQGEPGKRGKPGKDGENGQPGIPGLPGDPGYPGEPGRDGEKG |
| | XP_011529151.2) | QKGDTGPPGPPGLVIPRPGTGITIGEKGNIGLPGLPGEKGERGFPGIQGPPGLPGP |
| | | PGAAVMGPPGPPGFPGERGQKGDEGPPGISIPGPPGLDGQPGAPGLPGPPGPAGPH |
| | | IPPSDEICEPGPPGPPGSPGDKGLQGEQGVKGDKGDTCFNCIGTGISGPPGQPGLP |
| | | GLPGPPGSLGFPGQKGEKGQAGATGPKGLPGIPGAPGAPGFPGSKGEPGDILTFPG |
| | | MKGDKGELGSPGAPGLPGLPGTPGQDGLPGLPGPKGEPGGITFKGERGPPGNPGLP |
| | | GLPGNIGPMGPPGFGPPGPVGEKGIQGVAGNPGQPGIPGPKGDPGQTITQPGKPGL |
| | | PGNPGRDGDVGLPGDPGLPGQPGLPGIPGSKGEPGIPGIGLPGPPGPKGFPGIPGP |
| | | PGAPGTPGRIGLEGPPGPPGFPGPKGEPGFALPGPPGPPGLPGFKGALGPKGDRGF |
| | | PGPPGPPGRTGLDGLPGPKGDVGPNGQPGPMGPPGLPGIGVQGPPGPPGIPGPIGQ |
| | | PGLHGIPGEKGDPGPPGLDVPGPPGERGSPGIPGAPGPIGPPGSPGLPGKAGASGF |
| | | PGTKGEMGMMGPPGPPGPLGIPGRSGVPGLKGDDGLQGQPGLPGPTGEKGSKGEPG |
| | | LPGPPGPMDPNLLGSKGEKGEPGLPGIPGVSGPKGYQGLPGDPGQPGLSGQPGLPG |
| | | PPGPKGNPGLPGQPGLIGPPGLKGTIGDMGFPGPQGVEGPPGPSGVPGQPGSPGLP |
| | | GQKGDKGDPGISSIGLPGIPGPKGEPGLPGYPGNPGIKGSVGDPGLPGLPGTPGAK |
| | | GQPGLPGFPGTPGPPGPKGISGPPGNPGLPGEPGPVGGGGHPGQPGPPGEKGKPGQ |
| | | DGIPGPAGQKGEPGQPGFGNPGPPGLPGLSGQKGDGGLPGIPGNPGLPGPKGEPGF |
| | | HGFPGVQGPPGPPGSPGPALEGPKGNPGPQGPPGRPGPTGFQGLPGPEGPPGLPGN |
| | | GGIKGEKGNPGQPGLPGLPGLKGDQGPPGLQGNPGRPGLNGMKGDPGLPGVPGFPG |
| | | MKGPSGVPGSAGPEGEPGLIGPPGPPGLPGPSGQSIIIKGDAGPPGIPGQPGLKGL |
| | | PGPQGPQGLPGPTGPPGDPGRNGLPGFDGAGGRKGDPGLPGQPGTRGLDGPPGPDG |
| | | LQGPPGPPGTSSVAHGFLITRHSQTTDAPQCPQGTLQVYEGFSLLYVQGNKRAHGQ |
| | | DLGTAGSCLRRFSTMPFMFCNINNVCNFASRNDYSYWLSTPEPMPMSMQPLKGQSI |
| | | QPFISRCAVCEAPAVVIAVHSQTIQIPHCPQGWDSLWIGYSFMMHTSAGAEGSGQA |
| | | LASPGSCLEEFRSAPFIECHGRGTCNYYANSYSFWLATVDVSDMFSKPQSETLKAG |
| | | DLRTRISRCQVCMKRT |
| 97 | human alpha6 | MLINKLWLLLVTLCLTEELAAAGEKSYGKPCGGQDCSGSCQCFPEKGARGRPGPIG |
| | chain of type | IQGPTGPQGFTGSTGLSGLKGERGFPGLLGPYGPKGDKGPMGVPGFLGINGIPGHP |
| | IV collagen | GQPGPRGPPGLDGCNGTQGAVGFPGPDGYPGLLGPPGLPGQKGSKGDPVLAPGSFK |
| | (NCBI | GMKGDPGLPGLDGITGPQGAPGFPGAVGPAGPPGLQGPPGPPGPLGPDGNMGLGFQ |
| | Reference | GEKGVKGDVGLPGPAGPPPSTGELEFMGFPKGKKGSKGEPGPKGFPGISGPPGFPG |
| | Sequence: | LGTTGEKGEKGEKGIPGLPGPRGPMGSEGVQGPPGQQGKKGTLGFPGLNGFQGIEG |
| | XP_006724680.1) | QKGDIGLPGPDVFIDIDGAVISGNPGDPGVPGLPGLKGDEGIQGLRGPSGVPGLPA |
| | | LSGVPGALGPQGFPGLKGDQGNPGRTTIGAAGLPGRDGLPGPPGPPGPPSPEFETE |
| | | TLHNKESGFPGLRGEQGPKGNLGLKGIKGDSGFCACDGGVPNTGPPGEPGPPGPWG |
| | | LIGLPGLKGARGDRGSGGAQGPAGAPGLVGPLGPSGPKGKKGEPILSTIQGMPGDR |
| | | GDSGSQGFRGVIGEPGKDGVPGLPGLPGLPGDGGQGFPGEKGLPGLPGEKGHPGPP |
| | | GLPGNGLPGLPGPRGLPGDKGKDGLPGQQGLPGSKGDCCCREVGKGDLDTERGITL |
| | | PCIIPGSYGPSGFPGTPGFPGPKGSRGLPGTPGQPGSSGSKGEPGSPGLVHLPELP |
| | | GFPGPRGEKGLPGFPGLPGKDGLPGMIGSPGLPGSKGATGDIFGAENGAPGEQGLQ |
| | | GLTGHKGFLGDSGLPGLKGVHGKPGLLGPKGERGSPGTPGQVGQPGTPGSSGPYGI |
| | | KGKSGLPGAPGFPGISGHPGKKGTRGKKGPPGSIVKKGLPGLKGLPGNPGLVGLKG |
| | | SPGSPGVAGLPALSGPKGEKGSVGFVGFPGIPGLPGIPGTRGLKGIPGSTGKMGPS |
| | | GRAGTPGEKGDRGNPGPVGIPSPRRPMSNLWLKGDKGSQGSAGSNGFPGPRGDKGE |
| | | AGRPGPPGLPGAPGLPGIIKGVSGKPGPPGFMGIRGLPGLKGSSGITGFPGMPGES |
| | | GSQGIRGSPGLPGASGLPGLKGDNGQTVEISGSPGPKGQPGESGFKGTKGRDGLIG |
| | | NIGFPGNKGEDGKVGVSGDVGLPGAPGFPGVAGMRGEPGLPGSSGHQGAIGPLGSP |
| | | GLIGPKGFPGFPGLHGLNGLPGTKGTHGTPGPSITGVPGPAGLPGPKGEKGYPGIG |
| | | IGAPGKPGLRGQKGDRGFPGLQGPAGLPGAPGISLPSLIAGQPGDPGRPGLDGERG |
| | | RPGPAGPPGPPGPSSNQGDTGDPGFPGIPGPKGPKGDQGIPGFSGLPGELGLKGMR |
| | | GEPGFMGTPGKVGPPGDPGFPGMKGKAGPRGSSGLQGDPGQTPTAEAVQVPPGPLG |
| | | LPGIDGIPGLTGDPGAQGPVGLQGSKGLPGIPGKDGPSGLPGPPGALGDPGLPGLQ |
| | | GPPGFEGAPGQQGPFGMPGMPGQSMRVGYTLVKHSQSEQVPPCPIGMSQLWVGYSL |
| | | LFVEGQEKAHNQDLGFAGSCLPRFSTMPFIYCNINEVCHYARRNDKSYWLSTTAPI |
| | | PMMPVSQTQIPQYISRCSVCEAPSQAIAVHSQDITIPQCPLGWRSLWIGYSFLMHT |
| | | AAGAEGGGQSLVSPGSCLEDFRATPFIECSGARGTCHYFANKYSFWLTTVEERQQF |
| | | GELPVSETLKAGQLHTRVSRCQVCMKSL |
| 98 | LAIR-1 | QEEDLPRPSISAEPGTVIPLGSHVTFVCRGPVGVQTFRLERESRSTYNDTEDVSQA |
| | | SPSESEARFRIDSVSEGNAGPYRCIYYKPPKWSEQSDYLELLVKETSGGPDSPDTE |
| | | PGSSAGPTQRPSDNSHNEHAPASQGLKAEHLYILIGVSVVFLFCLLLLVLFCLHRQ |
| | | NQIKQGPPRSKDEEQKPQQRPDLAVDVLERTADKATVNGLPEKDRETDTSALAAGS |
| | | SQEVTYAQLDHWALTQRTARAVSPQSTKPMAESITYAAVARH |
| 99 | LAIR-2 | QEGALPRPSISAEPGTVISPGSHVTFMCRGPVGVQTFRLEREDRAKYKDSYNVFRL |
| | | GPSESEARFHIDSVSEGNAGLYRCLYYKPPGWSEHSDFLELLVKESSGGPDSPDTE |
| | | PGSSAGTVPGTEASGFDAP |
| 100 | Glycoprotein | GDLLIQKTIKKQVVLEEGTIAFKNWVKTGTEVYRQFWIFDVQNPQEVMMNSSNIQV |
| | IV (CD36 | KQRGPYTYRVRFLAKENVTQDAEDNTVSFLQPNGAIFEPSLSVGTEADNFTVLNLA |
| | extracellular | VAAASHIYQNQFVQMILNSLINKSKSSMFQVRTLRELLWGYRDPFLSLVPYPVTTT |
| | domain) | VGLFYPYNNTADGVYKVFNGKDNISKVAIIDTYKGKRNLSYWESHCDMINGTDAAS |
| | | FPPFVEKSQVLQFFSSDICRSIYAVFESDVNLKGIPVYRFVLPSKAFASPVENPDN |
| | | YCFCTEKIISKNCTSYGVLDISKCKEGRPVYISLPHFLYASPDVSEPIDGLNPNEE |
| | | EHRTYLDIEPITGFTLQFAKRLQV |
| | | NLLVKPSEKIQVLKNLKRNYIVPILWLNETGTIGDEKANMFRSQVTGKIN |
| 101 | Nidogen | LSRQELFPFGPGQGDLELEDGDDFVSPALELSGALRFYDRSDIDAVYVTTNGIIAT |
| | | SEPPAKESHPGLFPPTFGAVAPFLADLDTTDGLGKVYYREDLSPSITQRAAECVHR |
| | | GFPEISFQPSSAVVVTWESVAPYQGPSRDPDQKGKRNTFQAVLASSDSSSYAIFLY |
| | | PEDGLQFHTTFSKKENNQVPAVVAFSQGSVGFLWKSNGAYNIFANDRESVENLAKS |
| | | SNSGQQGVWVFEIGSPATTNGVVPADVILGTEDGAEYDDEDEDYDLATTRLGLEDV |
| | | GTTPFSYKALRRGGADTYSVPSVLSPRRAATERPLGPPTERTRSFQLAVETFHQQH |
| | | PQVIDVDEVEETGVVFSYNTDSRQTCANNRHQCSVHAECRDYATGFCCSCVAGYTG |
| | | NGRQCVAEGSPQRVNGKVKGRIFVGSSQVPIVFENTDLHSYVVMNHGRSYTAISTI |
| | | PETVGYSLLPLAPVGGIIGWMFAVEQDGFKNGFSITGGEFTRQAEVTFVGHPGNLV |
| | | IKQRFSGIDEHGHLTIDTELEGRVPQIPFGSSVHIEPYTELYHYSTSVITSSSTRE |
| | | YTVTEPERDGASPSRIYTYQWRQTITFQECVHDDSRPALPSTQQLSVDSVFVLYNQ |
| | | EEKILRYALSNSIGPVREGSPDALQNPCYIGTHGCDTNAACRPGPRTQFTCECSIG |
| | | FRGDGRTCYDIDECSEQPSVCGSHTICNNHPGTFRCECVEGYQFSDEGTCVAVVDQ |
| | | RPINYCETGLHNCDIPQRAQCIYTGGSSYTCSCLPGFSGDGQACQDVDECQPSRCH |
| | | PDAFCYNTPGSFTCQCKPGYQGDGFRCVPGEVEKTRCQHEREHILGAAGATDPQRP |
| | | IPPGLFVPECDAHGHYAPTQCHGSTGYCWCVDRDGREVEGTRTRPGMTPPCLSTVA |
| | | PPIHQGPAVPTAVIPLPPGTHLLFAQTGKIERLPLEGNTMRKTEAKAFLHVPAKVI |
| | | IGLAFDCVDKMVYWTDITEPSIGRASLHGGEPTTIIRQDLGSPEGIAVDHLGRNIF |
| | | WTDSNLDRIEVAKLDGTQRRVLFETDLVNPRGIVTDSVRGNLYWTDWNRDNPKIET |
| | | SYMDGTNRRILVQDDLGLPNGLTFDAFSSQLCWVDAGTNRAECLNPSQPSRRKALE |
| | | GLQYPFAVTSYGKNLYFTDWKMNSVVALDLAISKETDAFQPHKQTRLYGITTALSQ |
| | | CPQGHNYCSVNNGGCTHLCLATPGSRTCRCPDNTLGVDCIEQK |
| 102 | Perlecan | VTHGLRAYDGLSLPEDIETVTASQMRWTHSYLSDDEDMLADSISGDDLGSGDLGSG |
| | | DFQMVYFRALVNFTRSIEYSPQLEDAGSREFREVSEAVVDTLESEYLKIPGDQVVS |
| | | VVFIKELDGWVFVELDVGSEGNADGAQIQEMLLRVISSGSVASYVTSPQGFQFRRL |
| | | GTVPQFPRACTEAEFACHSYNECVALEYRCDRRPDCRDMSDELNCEEPVLGISPTF |
| | | SLLVETTSLPPRPETTIMRQPPVTHAPQPLLPGSVRPLPCGPQEAACRNGHCIPRD |
| | | YLCDGQEDCEDGSDELDCGPPPPCEPNEFPCGNGHCALKLWRCDGDFDCEDRTDEA |
| | | NCPTKRPEEVCGPTQFRCVSTNMCIPASFHCDEESDCPDRSDEFGCMPPQVVTPPR |
| | | ESIQASRGQTVTFTCVAIGVPTPIINWRLNWGHIPSHPRVTVTSEGGRGTLIIRDV |
| | | KESDQGAYTCEAMNARGMVFGIPDGVLELVPQRGPCPDGHFYLEHSAACLPCFCFG |
| | | ITSVCQSTRRFRDQIRLRFDQPDDFKGVNVTMPAQPGTPPLSSTQLQIDPSLHEFQ |
| | | LVDLSRRFLVHDSFWALPEQFLGNKVDSYGGSLRYNVRYELARGMLEPVQRPDVVL |
| | | MGAGYRLLSRGHTPTQPGALNQRQVQFSEEHWVHESGRPVQRAELLQVLQSLEAVL |
| | | IQTVYNTKMASVGLSDIAMDTTVTHATSHGRAHSVEECRCPIGYSGLSCESCDAHF |
| | | TRVPGGPYLGTCSGCNCNGHASSCDPVYGHCLNCQHNTEGPQCNKCKAGFFGDAMK |
| | | ATATSCRPCPCPYIDASRRFSDTCFLDTDGQATCDACAPGYTGRRCESCAPGYEGN |
| | | PIQPGGKCRPVNQEIVRCDERGSMGTSGEACRCKNNVVGRLCNECADGSFHLSTRN |
| | | PDGCLKCFCMGVSRHCTSSSWSRAQLHGASEEPGHFSLTNAASTHTTNEGIFSPTP |
| | | GELGFSSFHRLLSGPYFWSLPSRFLGDKVTSYGGELRFTVTQRSQPGSTPLHGQPL |
| | | VVLQGNNIILEHHVAQEPSPGQPSTFIVPFREQAWQRPDGQPATREHLLMALAGID |
| | | TLLIRASYAQQPAESRVSGISMDVAVPEETGQDPALEVEQCSCPPGYRGPSCQDCD |
| | | TGYTRTPSGLYLGTCERCSCHGHSEACEPETGACQGCQHHTEGPRCEQCQPGYYGD |
| | | AQRGTPQDCQLCPCYGDPAAGQAAHTCFLDTDGHPTCDACSPGHSGRHCERCAPGY |
| | | YGNPSQGQPCQRDSQVPGPIGCNCDPQGSVSSQCDAAGQCQCKAQVEGLTCSHCRP |
| | | HHFHLSASNPDGCLPCFCMGITQQCASSAYTRHLISTHFAPGDFQGFALVNPQRNS |
| | | RLTGEFTVEPVPEGAQLSFGNFAQLGHESFYWQLPETYQGDKVAAYGGKLRYTLSY |
| | | TAGPQGSPLSDPDVQITGNNIMLVASQPALQGPERRSYEIMFREEFWRRPDGQPAT |
| | | REHLLMALADLDELLIRATFSSVPLAASISAVSLEVAQPGPSNRPRALEVEECRCP |
| | | PGYIGLSCQDCAPGYTRTGSGLYLGHCELCECNGHSDLCHPETGACSQCQHNAAGE |
| | | FCELCAPGYYGDATAGTPEDCQPCACPLTNPENMFSRTCESLGAGGYRCTACEPGY |
| | | TGQYCEQCGPGYVGNPSVQGGQCLPETNQAPLVVEVHPARSIVPQGGSHSLRCQVS |
| | | GSPPHYFYWSREDGRPVPSGTQQRHQGSELHFPSVQPSDAGVYICTCRNLHQSNTS |
| | | RAELLVTEAPSKPITVTVEEQRSQSVRPGADVTFICTAKSKSPAYTLVWTRLHNGK |
| | | LPTRAMDFNGILTIRNVQLSDAGTYVCTGSNMFAMDQGTATLHVQASGTLSAPVVS |
| | | IHPPQLTVQPGQLAEFRCSATGSPTPTLEWTGGPGGQLPAKAQIHGGILRLPAVEP |
| | | TDQAQYLCRAHSSAGQQVARAVLHVHGGGGPRVQVSPERTQVHAGRTVRLYCRAAG |
| | | VPSATITWRKEGGSLPPQARSERTDIATLLIPAITTADAGFYLCVATSPAGTAQAR |
| | | IQVVVLSASDASPPPVKIESSSPSVTEGQTLDLNCVVAGSAHAQVTWYRRGGSLPP |
| | | HTQVHGSRLRLPQVSPADSGEYVCRVENGSGPKEASITVSVLHGTHSGPSYTPVPG |
| | | STRPIRIEPSSSHVAEGQTLDLNCVVPGQAHAQVTWHKRGGSLPARHQTHGSLLRL |
| | | HQVTPADSGEYVCHVVGTSGPLEASVLVTIEASVIPGPIPPVRIESSSSTVAEGQT |
| | | LDLSCVVAGQAHAQVTWYKRGGSLPARHQVRGSRLYIFQASPADAGQYVCRASNGM |
| | | EASITVTVTGTQGANLAYPAGSTQPIRIEPSSSQVAEGQTLDLNCVVPGQSHAQVT |
| | | WHKRGGSLPVRHQTHGSLLRLYQASPADSGEYVCRVLGSSVPLEASVLVTIEPAGS |
| | | VPALGVTPTVRIESSSSQVAEGQTLDLNCLVAGQAHAQVTWHKRGGSLPARHQVHG |
| | | SRLRLLQVTPADSGEYVCRVVGSSGTQEASVLVTIQQRLSGSHSQGVAYPVRIESS |
| | | SASLANGHTLDLNCLVASQAPHTITWYKRGGSLPSRHQIVGSRLRIPQVTPADSGE |
| | | YVCHVSNGAGSRETSLIVTIQGSGSSHVPSVSPPIRIESSSPTVVEGQTLDLNCVV |
| | | ARQPQAIITWYKRGGSLPSRHQTHGSHLRLHQMSVADSGEYVCRANNNIDALEASI |
| | | VISVSPSAGSPSAPGSSMPIRIESSSSHVAEGETLDLNCVVPGQAHAQVTWHKRGG |
| | | SLPSHHQTRGSRLRLHHVSPADSGEYVCRVMGSSGPLEASVLVTIEASGSSAVHVP |
| | | APGGAPPIRIEPSSSRVAEGQTLDLKCVVPGQAHAQVTWHKRGGNLPARHQVHGPL |
| | | LRLNQVSPADSGEYSCQVTGSSGTLEASVLVTIEPSSPGPIPAPGLAQPIYIEASS |
| | | SHVTEGQTLDLNCVVPGQAHAQVTWYKRGGSLPARHQTHGSQLRLHLVSPADSGEY |
| | | VCRAASGPGPEQEASFTVTVPPSEGSSYRLRSPVISIDPPSSTVQQGQDASFKCLI |
| | | HDGAAPISLEWKTRNQELEDNVHISPNGSIITIVGTRPSNHGTYRCVASNAYGVAQ |
| | | SVVNLSVHGPPTVSVLPEGPVWVKVGKAVTLECVSAGEPRSSARWTRISSTPAKLE |
| | | QRTYGLMDSHAVLQISSAKPSDAGTYVCLAQNALGTAQKQVEVIVDTGAMAPGAPQ |
| | | VQAEEAELTVEAGHTATLRCSATGSPAPTIHWSKLRSPLPWQHRLEGDTLIIPRVA |
| | | QQDSGQYICNATSPAGHAEATIILHVESPPYATTVPEHASVQAGETVQLQCLAHGT |
| | | PPLTFQWSRVGSSLPGRATARNELLHFERAAPEDSGRYRCRVTNKVGSAEAFAQLL |
| | | VQGPPGSLPATSIPAGSTPTVQVTPQLETKSIGASVEFHCAVPSDRGTQLRWFKEG |
| | | GQLPPGHSVQDGVLRIQNLDQSCQGTYICQAHGPWGKAQASAQLVIQALPSVLINI |
| | | RTSVQTVVVGHAVEFECLALGDPKPQVTWSKVGGHLRPGIVQSGGVVRIAHVELAD |
| | | AGQYRCTATNAAGTTQSHVLLLVQALPQISMPQEVRVPAGSAAVFPCIASGYPTPD |
| | | ISWSKLDGSLPPDSRLENNMLMLPSVRPQDAGTYVCTATNRQGKVKAFAHLQVPER |
| | | VVPYFTQTPYSFLPLPTIKDAYRKFEIKITFRPDSADGMLLYNGQKRVPGSPTNLA |
| | | NRQPDFISFGLVGGRPEFRFDAGSGMATIRHPTPLALGHFHTVTLLRSLTQGSLIV |
| | | GDLAPVNGTSQGKFQGLDLNEELYLGGYPDYGAIPKAGLSSGFIGCVRELRIQGEE |
| | | IVFHDLNLTAHGISHCPTCRDRPCQNGGQCHDSESSSYVCVCPAGFTGSRCEHSQA |
| | | LHCHPEACGPDATCVNRPDGRGYTCRCHLGRSGLRCEEGVTVTTPSLSGAGSYLAL |
| | | PALTNTHHELRLDVEFKPLAPDGVLLFSGGKSGPVEDFVSLAMVGGHLEFRYELGS |
| | | GLAVLRSAEPLALGRWHRVSAERLNKDGSLRVNGGRPVLRSSPGKSQGLNLHTLLY |
| | | LGGVEPSVPLSPATNMSAHFRGCVGEVSVNGKRLDLTYSFLGSQGIGQCYDSSPCE |
| | | RQPCQHGATCMPAGEYEFQCLCRDGFKGDLCEHEENPCQLREPCLHGGTCQGTRCL |
| | | CLPGFSGPRCQQGSGHGIAESDWHLEGSGGNDAPGQYGAYFHDDGFLAFPGHVFSR |
| | | SLPEVPETIELEVRTSTASGLLLWQGVEVGEAGQGKDFISLGLQDGHLVFRYQLGS |
| | | GEARLVSEDPINDGEWHRVTALREGRRGSIQVDGEELVSGRSPGPNVAVNAKGSVY |
| | | IGGAPDVATLTGGRFSSGITGCVKNLVLHSARPGAPPPQPLDLQHRAQAGANTRPC |
| | | PS |
| 103 | Biglycan | DEEASGADTSGVLDPDSVTPTYSAMCPFGCHCHLRVVQCSDLGLKSVPKEISPDTT |
| | | LLDLQNNDISELRKDDFKGLQHLYALVLVNNKISKIHEKAFSPLRKLQKLYISKNH |
| | | LVEIPPNLPSSLVELRIHDNRIRKVPKGVFSGLRNMNCIEMGGNPLENSGFEPGAF |
| | | DGLKLNYLRISEAKLTGIPKDLPETLNELHLDHNKIQAIELEDLLRYSKLYRLGLG |
| | | HNQIRMIENGSLSFLPTLRELHLDNNKLARVPSGLPDLKLLQVVYLHSNNITKVGV |
| | | NDFCPMGFGVKRAYYNGISLFNNPVPYWEVQPATFRCVTDRLAIQFGNYKK |
| 104 | Decorin | DEASGIGPEVPDDRDFEPSLGPVCPFRCQCHLRVVQCSDLGLDKVPKDLPPDTTLL |
| | | DLQNNKITEIKDGDFKNLKNLHALILVNNKISKVSPGAFTPLVKLERLYLSKNQLK |
| | | ELPEKMPKTLQELRAHENEITKVRKVTFNGLNQMIVIELGTNPLKSSGIENGAFQG |
| | | MKKLSYIRIADTNITSIPQGLPPSLTELHLDGNKISRVDAASLKGLNNLAKLGLSF |
| | | NSISAVDNGSLANTPHLRELHLDNNKLTRVPGGLAEHKYIQVVYLHNNNISVVGSS |
| | | DFCPPGHNTKKASYSGVSLFSNPVQYWEIQPSTFRCVYVRSAIQLGNYK |
| 105 | Asporin | DMEDTDDDDDDDDDDDDDDEDNSLFPTREPRSHFFPFDLFPMCPFGCQCYSRVVHC |
| | | SDLGLTSVPTNIPFDTRMLDLQNNKIKEIKENDFKGLTSLYGLILNNNKLTKIHPK |
| | | AFLTTKKLRRLYLSHNQLSEIPLNLPKSLAELRIHENKVKKIQKDTFKGMNALHVL |
| | | EMSANPLDNNGIEPGAFEGVTVFHIRIAEAKLTSVPKGLPPTLLELHLDYNKISTV |
| | | ELEDFKRYKELQRLGLGNNKITDIENGSLANIPRVREIHLENNKLKKIPSGLPELK |
| | | YLQIIFLHSNSIARVGVNDFCPTVPKMKKSLYSAISLFNNPVKYWEMQPATFRCVL |
| | | SRMSVQLGNFGM |
| 106 | Fibromodulin | QYEDDPHWWFHYLRSQQSTYYDPYDPYPYETYEPYPYGVDEGPAYTYGSPSPPDPR |
| | | DCPQECDCPPNFPTAMYCDNRNLKYLPFVPSRMKYVYFQNNQITSIQEGVFDNATG |
| | | LLWIALHGNQITSDKVGRKVFSKLRHLERLYLDHNNLTRMPGPLPRSLRELHLDHN |
| | | QISRVPNNALEGLENLTALYLQHNEIQEVGSSMRGLRSLILLDLSYNHLRKVPDGL |
| | | PSALEQLYMEHNNVYTVPDSYFRGAPKLLYVRLSHNSLTNNGLASNTFNSSSLLEL |
| | | DLSYNQLQKIPPVNTNLENLYLQGNRINEFSISSFCTVVDVVNFSKLQVLRLDGNE |
| | | IKRSAMPADAPLCLRLASLIEI |
| 107 | Lumican | QYYDYDFPLSIYGQSSPNCAPECNCPESYPSAMYCDELKLKSVPMVPPGIKYLYLR |
| | | NNQIDHIDEKAFENVTDLQWLILDHNLLENSKIKGRVFSKLKQLKKLHINHNNLTE |
| | | SVGPLPKSLEDLQLTHNKITKLGSFEGLVNLTFIHLQHNRLKEDAVSAAFKGLKSL |
| | | EYLDLSFNQIARLPSGLPVSLLTLYLDNNKISNIPDEYFKRFNALQYLRLSHNELA |
| | | DSGIPGNSFNVSSLVELDLSYNKLKNIPTVNENLENYYLEVNQLEKFDIKSFCKIL |
| | | GPLSYSKIKHLRLDGNRISETSLPPDMYECLRVANEVTLN |
| 108 | PRELP | QPTRRPRPGTGPGRRPRPRPRPTPSFPQPDEPAEPTDLPPPLPPGPPSIFPDCPRE |
| | | CYCPPDFPSALYCDSRNLRKVPVIPPRIHYLYLQNNFITELPVESFQNATGLRWIN |
| | | LDNNRIRKIDQRVLEKLPGLVFLYMEKNQLEEVPSALPRNLEQLRLSQNHISRIPP |
| | | GVFSKLENLLLLDLQHNRLSDGVFKPDTFHGLKNLMQLNLAHNILRKMPPRVPTAI |
| | | HQLYLDSNKIETIPNGYFKSFPNLAFIRLNYNKLTDRGLPKNSFNISNLLVLHLSH |
| | | NRISSVPAINNRLEHLYLNNNSIEKINGTQICPNDLVAFHDFSSDLENVPHLRYLR |
| | | LDGNYLKPPIPLDLMMCFRLLQSV [symbol] VI |
| 109 | Osteoadherin/ | QYETYQWDEDYDQEPDDDYQTGFPFRQNVDYGVPFHQYTLGCVSECFCPTNFPSSM |
| | Osteomodulin | YCDNRKLKTIPNIPMHIQQLYLQFNEIEAVTANSFINATHLKEINLSHNKIKSQKI |
| | | DYGVFAKLPNLLQLHLEHNNLEEFPFPLPKSLERLLLGYNEISKLQTNAMDGLVNL |
| | | TMLDLCYNYLHDSLLKDKIFAKMEKLMQLNLCSNRLESMPPGLPSSLMYLSLENNS |
| | | ISSIPEKYFDKLPKLHTLRMSHNKLQDIPYNIFNLPNIVELSVGHNKLKQAFYIPR |
| | | NLEHLYLQNNEIEKMNLTVMCPSIDPLHYHHLTYIRVDQNKLKEPISSYIFFCFPH |
| | | IHTIYYGEQRSTNGQTIQLKTQVFRRFPDDDDESEDHDDPDNAHESPEQEGAEGHF |
| | | DLHYYENQE |
| 110 | Opticin | ASLPRKERKRREEQMPREGDSFEVLPLRNDVLNPDNYGEVIDLSNYEELTDYGDQL |
| | | PEVKVTSLAPATSISPAKSTTAPGTPSSNPTMTRPTTAGLLLSSQPNHGLPTCLVC |
| | | VCLGSSVYCDDIDLEDIPPLPRRTAYLYARFNRISRIRAEDFKGLTKLKRIDLSNN |
| | | LISSIDNDAFRLLHALQDLILPENQLEALPVLPSGIEFLDVRLNRLQSSGIQPAAF |
| | | RAMEKLQFLYLSDNLLDSIPGPLPLSLRSVHLQNNLIETMQRDVFCDPEEHKHTRR |
| | | QLEDIRLDGNPINLSLFPSAYFCLPRLPIGRFT |
| 111 | Osteoglycin/ | PPTQQDSRIIYDYGTDNFEESIFSQDYEDKYLDGKNIKEKETVIIPNEKSLQLQKD |
| | Mimecan | EAITPLPPKKENDEMPTCLLCVCLSGSVYCEEVDIDAVPPLPKESAYLYARFNKIK |
| | | KLTAKDFADIPNLRRLDFTGNLIEDIEDGTFSKLSLLEELSLAENQLLKLPVLPPK |
| | | LTLFNAKYNKIKSRGIKANAFKKLNNLTFLYLDHNALESVPLNLPESLRVIHLQFN |
| | | NIASITDDTFCKANDTSYIRDRIEEIRLEGNPIVLGKHPNSFICLKRLPIGSYF |
| 112 | Chondroadherin | QRCPQACICDNSRRHVACRYQNLTEVPDAIPELTQRLDLQGNLLKVIPAAAFQGVP |
| | | HLTHLDLRHCEVELVAEGAFRGLGRLLLLNLASNHLRELPQEALDGLGSLRRLELE |
| | | GNALEELRPGTFGALGALATLNLAHNALVYLPAMAFQGLLRVRWLRLSHNALSVLA |
| | | PEALAGLPALRRLSLHHNELQALPGPVLSQARGLARLELGHNPLTYAGEEDGLALP |
| | | GLRELLLDGGALQALGPRAFAHCPRLHTLDLRGNQLDTLPPLQGPGQLRRLRLQGN |
| | | PLWCGCQARPLLEWLARARVRSDGACQGPRRLRGEALDALRPWDLRCPGDAAQEEE |
| | | ELEERAVAGPRAPPRGPPRGPGEERAVAPCPRACVCVPESRHSSCEGCGLQAVPRG |
| | | FPSDTQLLDLRRNHFPSVPRAAFPGLGHLVSLHLQHCGIAELEAGALAGLGRLIYL |
| | | YLSDNQLAGLSAAALEGAPRLGYLYLERNRFLQVPGAALRALPSLFSLHLQDNAVD |
| | | RLAPGDLGRTRALRWVYLSGNRITEVSLGALGPARELEKLHLDRNQLREVPTGALE |
| | | GLPALLELQLSGNPLRALRDGAFQPVGRSLQHLFLNSSGLEQICPGAFSGLGPGLQ |
| | | SLHLQKNQLRALPALPSLSQLELIDLSSNPFHCDCQLLPLHRWLTGLNLRVGATCA |
| | | TPPNARGQRVKAAAAVFEDCPGWAARKAKRTPASRPSARRTPIKGRQCGADKVGKE |
| | | KGRL |
| 113 | Podocan | GPVLAVRAPGFGRSGGHSLSPEENEFAEEEPVLVLSPEEPGPGPAAVSCPRDCACS |
| | | QEGVVDCGGIDLREFPGDLPEHTNHLSLQNNQLEKIYPEELSRLHRLETLNLQNNR |
| | | LTSRGLPEKAFEHLYNLNYLYLANNKLTLAPRFLPNALISVDFAANYLTKIYGLTF |
| | | GQKPNLRSVYLHNNKLADAGLPDNMFNGSSNVEVLILSSNFLRHVPKHLPPALYKL |
| | | HLKNNKLEKIPPGAFSELSSLRELYLQNNYLTDEGLDNETFWKLSSLEYLDLSSNN |
| | | LSRVPAGLPRSLVLLHLEKNAIRSVDANVLTPIRSLEYLLLHSNQLREQGIHPLAF |
| | | QGLKRLHTVHLYNNALERVPSGLPRRVRTLMILHNQITGIGREDFATTYFLEELNL |
| | | SYNRITSPQVHRDAFRKLRLLRSLDLSGNRLHTLPPGLPRNVHVLKVKRNELAALA |
| | | RGALVGMAQLRELYLTSNRLRSRALGPRAWVDLAHLQLLDIAGNQLTEIPEGLPES |
| | | LEYLYLQNNKISAVPANAFDSTPNLKGIFLRFNKLAVGSVVDSAFRRLKHLQVLDI |
| | | EGNLEFGDISKDRGRLGKEKEEEEEEEEEEEETR |
| 114 | Human IgG1 | ASTKGPSVFPLAPSSKSTSGGTAALGCLVKDYFPEPVTVSWNSGALTSGVHTFPAV |
| | constant | LQSSGLYSLSSVVTVPSSSLGTQTYICNVNHKPSNTKVDKKVEPKSCDKTHTCPPC |
| | region (amino | PAPELLGGPSVFLFPPKPKDTLMISRTPEVTCVVVDVSHEDPEVKFNWYVDGVEVH |
| | acid sequence) | NAKTKPREEQYNSTYRVVSVLTVLHQDWLNGKEYKCKVSNKALPAPIEKTISKAKG |
| | | QPREPQVYTLPPSRDELTKNQVSLTCLVKGFYPSDIAVEWESNGQPENNYKTTPPV |
| | | LDSDGSFFLYSKLTVDKSRWQQGNVFSCSVMHEALHNHYTQKSLSLSPGK |
| 115 | Human IgG1 | EPKSCDKTHTCPPCPAPELLGGPSVFLFPPKPKDTLMISRTPEVTCVVVDVSHEDP |
| | Fc domain | EVKFNWYVDGVEVHNAKTKPREEQYNSTYRVVSVLTVLHQDWLNGKEYKCKVSNKA |
| | (amino acid | LPAPIEKTISKAKGQPREPQVYTLPPSRDELTKNQVSLTCLVKGFYPSDIAVEWES |
| | sequence) | NGQPENNYKTTPPVLDSDGSFFLYSKLTVDKSRWQQGNVFSCSVMHEALHNHYTQK |
| | | SLSLSPGK |
| 116 | HSA domain I | DAHKSEVAHRFKDLGEENFKALVLIAFAQYLQQCPFEDHVKLVNEVTEFAKTCVAD |
| | | ESAENCDKSLHTLFGDKLCTVATLRETYGEMADCCAKQEPERNECFLQHKDDNPNL |
| | | PRLVRPEVDVMCTAFHDNEETFLKKYLYEIARRHPYFYAPELLFFAKRYKAAFTEC |
| | | CQAADKAACLLPKLDELRDEGKASSAKQR |
| 117 | HSA domain II | GKASSAKQRLKCASLQKFGERAFKAWAVARLSQRFPKAEFAEVSKLVTDLTKVHTE |
| | | CCHGDLLECADDRADLAKYICENQDSISSKLKECCEKPLLEKSHCIAEVENDEMPA |
| | | DLPSLAADFVESKDVCKNYAEAKDVFLGMFLYEYARRHPDYSVVLLLRLAKTYETT |
| | | LEKCCAAADPHECYAKVFDEFKPLVEEPQ |
| 118 | HSA domain III | NLIKQNCELFEQLGEYKFQNALLVRYTKKVPQVSTPTLVEVSRNLGKVGSKCCKHP |
| | | EAKRMPCAEDYLSVVLNQLCVLHEKTPVSDRVTKCCTESLVNRRPCFSALEVDETY |
| | | VPKEFNAETFTFHADICTLSEKERQIKKQTALVELVKHKPKATKEQLKAVMDDFAA |
| | | FVEKCCKADDKETCFAEEGKKLVAASQAALGL |
| 119 | Linker | LEA (EAAAK) ₄ALEA (EAAAK) ₄ALE |
| 120 | Lumican- | QYYDYDIPLFMYGQISPNCAPECNCPHSYPTAMYCDDLKLKSVPMVPPGIKYLYLR |
| | MSA-IL2 | NNQIDHIDEKAFENVTDLQWLILDHNLLENSKIKGKVFSKLKQLKKLHINYNNLTE |
| | (lumican in | SVGPLPKSLQDLQLTNNKISKLGSFDGLVNLTFIYLQHNQLKEDAVSASLKGLKSL |
| | bold; linkers | EYLDLSFNQMSKLPAGLPTSLLTLYLDNNKISNIPDEYFKRFTGLQYLRLSHNELA |
| | in italics; | DSGVPGNSFNISSLLELDLSYNKLKSIPTVNENLENYYLEVNELEKFDVKSFCKIL |
| | MSA underlined; | GPLSYSKIKHLRLDGNPLTQSSLPPDMYECLRVANEITVNGGGSGGGSEAHKSEIA |
| | IL2 bold and | HRYNDLGEQHFKGLVLIAFSQYLQKCSYDEHAKLVQEVTDFAKTCVADESAANCDK |
| | underline; | SLHTLFGDKLCAIPNLRENYGELADCCTKQEPERNECFLQHKDDNPSLPPFERPEA |
| | HIS tag dotted | EAMCTSFKENPTTFMGHYLHEVARRHPYFYAPELLYYAEQYNEILTQCCAEADKES |
| | underlined) | CLTPKLDGVKEKALVSSVRQRMKCSSMQKFGERAFKAWAVARLSQTFPNADFAEIT |
| | | KLATDLTKVNKECCHGDLLECADDRAELAKYMCENQATISSKLQTCCDKPLLKKAH |
| | | CLSEVEHDTMPADLPAIAADFVEDQEVCKNYAEAKDVFLGTFLYEYSRRHPDYSVS |
| | | LLLRLAKKYEATLEKCCAEANPPACYGTVLAEFQPLVEEPKNLVKTNCDLYEKLGE |
| | | YGFQNAILVRYTQKAPQVSTPTLVEAARNLGRVGTKCCTLPEDQRLPCVEDYLSAI |
| | | LNRVCLLHEKTPVSEHVTKCCSGSLVERRPCFSALTVDETYVPKEFKAETFTFHSD |
| | | ICTLPEKEKQIKKQTALAELVKHKPKATAEQLKTVMDDFAQFLDTCCKAADKDTCF |
| | | STEGPNLVTRCKDALAGGGSAPTSSSTSSSTAEAQQQQQQQQQQQQHLEQLLMDLQ |
| | | ELLSRMENYRNLKLPRMLTFKFYLPKQATELKDLQCLEDELGPLRHVLDLTQSKSF |
| | | QLEDAENFISNIRVTVVKLKGSDNTFECQFDDESATVVDFLRRWIAFCQSIISTSP |
| | | Q [chemical structure] |
| 121 | MSA-IL2 | EAHKSEIAHRYNDLGEQHFKGLVLIAFSQYLQKCSYDEHAKLVQEVTDFAKTCVAD |
| | (MSA in | ESAANCDKSLHTLFGDKLCAIPNLRENYGELADCCTKQEPERNECFLQHKDDNPSL |
| | bold; linkers | PPFERPEAEAMCTSFKENPTTFMGHYLHEVARRHPYFYAPELLYYAEQYNEILTQC |
| | in italics; | CAEADKESCLTPKLDGVKEKALVSSVRQRMKCSSMQKFGERAFKAWAVARLSQTFP |
| | IL2 underlined; | NADFAEITKLATDLTKVNKECCHGDLLECADDRAELAKYMCENQATISSKLQTCCD |
| | HIS tag dotted | KPLLKKAHCLSEVEHDTMPADLPAIAADFVEDQEVCKNYAEAKDVFLGTFLYEYSR |
| | underlined) | RHPDYSVSLLLRLAKKYEATLEKCCAEANPPACYGTVLAEFQPLVEEPKNLVKTNC |
| | | DLYEKLGEYGFQNAILVRYTQKAPQVSTPTLVEAARNLGRVGTKCCTLPEDQRLPC |
| | | VEDYLSAILNRVCLLHEKTPVSEHVTKCCSGSLVERRPCFSALTVDETYVPKEFKA |
| | | ETFTFHSDICTLPEKEKQIKKQTALAELVKHKPKATAEQLKTVMDDFAQFLDTCCK |
| | | AADKDTCFSTEGPNLVTRCKDALAGGGSAPTSSSTSSSTAEAQQQQQQQQQQQQHL |
| | | EQLLMDLQELLSRMENYRNLKLPRMLTFKFYLPKQATELKDLQCLEDELGPLRHVL |
| | | DLTQSKSFQLEDAENFISNIRVTVVKLKGSDNTFECQFDDESATVVDFLRRWIAFC |
| | | QSIISTSPQ [chemical structure] |
| 122 | IL12-MSA | MWELEKDVYVVEVDWTPDAPGETVNLTCDTPEEDDITWTSDQRHGVIGSGKTLTIT |
| | (IL12p40 bold; | VKEFLDAGQYTCHKGGETLSHSHLLLHKKENGIWSTEILKNFKNKTFLKCEAPNYS |
| | linkers | GRFTCSWLVQRNMDLKFNIKSSSSSPDSRAVTCGMASLSAEKVTLDQRDYEKYSVS |
| | italics; | CQEDVTCPTAEETLPIELALEARQQNKYENYSTSFFIRDIIKPDPPKNLQMKPLKN |
| | IL12p34 | SQVEVSWEYPDSWSTPHSYFSLKFFVRIQRKKEKMKETEEGCNQKGAFLVEKTSTE |
| | underlined; | VQCKGGNVCVQAQDRYYNSSCSKWACVPCRVRSGGSGGGSGGGSGGGSRVIPVSGP |
| | MSA bold and | ARCLSQSRNLLKTTDDMVKTAREKLKHYSCTAEDIDHEDITRDQTSTLKTCLPLEL |
| | underlined; | HKNESCLATRETSSTTRGSCLPPQKTSLMMTLCLGSIYEDLKMYQTEFQAINAALQ |
| | HIS tag | NHNHQQIILDKGMLVAIDELMQSLNHNGETLRQKPPVGEADPYRVKMKLCILLHAF |
| | dotted | STRVVTINRVMGYLSSAGSGGGSEAHKSEIAHRYNDLGEQHFKGLVLIAFSQYLQK |
| | underlined) | CSYDEHAKLVQEVTDFAKTCVADESAANCDKSLHTLFGDKLCAIPNLRENYGELAD |
| | | CCTKQEPERNECFLQHKDDNPSLPPFERPEAEAMCTSFKENPTTFMGHYLHEVARR |
| | | HPYFYAPELLYYAEQYNEILTQCCAEADKESCLTPKLDGVKEKALVSSVRQRMKCS |
| | | SMQKFGERAFKAWAVARLSQTFPNADFAEITKLATDLTKVNKECCHGDLLECADDR |
| | | AELAKYMCENQATISSKLQTCCDKPLLKKAHCLSEVEHDTMPADLPAIAADFVEDQ |
| | | EVCKNYAEAKDVFLGTFLYEYSRRHPDYSVSLLLRLAKKYEATLEKCCAEANPPAC |
| | | YGTVLAEFQPLVEEPKNLVKTNCDLYEKLGEYGFQNAILVRYTQKAPQVSTPTLVE |
| | | AARNLGRVGTKCCTLPEDQRLPCVEDYLSAILNRVCLLHEKTPVSEHVTKCCSGSL |
| | | VERRPCFSALTVDETYVPKEFKAETFTFHSDICTLPEKEKQIKKQTALAELVKHKP |
| | | KATAEQLKTVMDDFAQFLDTCCKAADKDTCFSTEGPNLVTRCKDALA [chemical structure] |
| 123 | IL12-MSA- | MWELEKDVYVVEVDWTPDAPGETVNLTCDTPEEDDITWTSDQRHGVIGSGKTLTIT |
| | Lumican | VKEFLDAGQYTCHKGGETLSHSHLLLHKKENGIWSTEILKNFKNKTFLKCEAPNYS |
| | (IL12p40 bold; | GRFTCSWLVQRNMDLKFNIKSSSSSPDSRAVTCGMASLSAEKVTLDQRDYEKYSVS |
| | linkers italics; | CQEDVTCPTAEETLPIELALEARQQNKYENYSTSFFIRDIIKPDPPKNLQMKPLKN |
| | IL12p34 | SQVEVSWEYPDSWSTPHSYFSLKFFVRIQRKKEKMKETEEGCNQKGAFLVEKTSTE |
| | underlined; | VQCKGGNVCVQAQDRYYNSSCSKWACVPCRVRSGGSGGGSGGGSGGGSRVIPVSGP |
| | MSA bold and | ARCLSQSRNLLKTTDDMVKTAREKLKHYSCTAEDIDHEDITRDQTSTLKTCLPLEL |
| | underlined; | HKNESCLATRETSSTTRGSCLPPQKTSLMMTLCLGSIYEDLKMYQTEFQAINAALQ |
| | lumican bold, | NHNHQQIILDKGMLVAIDELMQSLNHNGETLRQKPPVGEADPYRVKMKLCILLHAF |
| | underlined | STRVVTINRVMGYLSSAGSGGGSEAHKSEIAHRYNDLGEQHFKGLVLIAFSQYLQK |
| | and italc; HIS | CSYDEHAKLVQEVTDFAKTCVADESAANCDKSLHTLFGDKLCAIPNLRENYGELAD |
| | tag dotted | CCTKQEPERNECFLQHKDDNPSLPPFERPEAEAMCTSFKENPTTFMGHYLHEVARR |
| | underlined) | HPYFYAPELLYYAEQYNEILTQCCAEADKESCLTPKLDGVKEKALVSSVRQRMKCS |
| | | SMQKFGERAFKAWAVARLSQTFPNADFAEITKLATDLTKVNKECCHGDLLECADDR |
| | | AELAKYMCENQATISSKLQTCCDKPLLKKAHCLSEVEHDTMPADLPAIAADFVEDQ |
| | | EVCKNYAEAKDVFLGTFLYEYSRRHPDYSVSLLLRIAKKYEATLEKCCAEANPPAC |
| | | YGTVLAEFQPLVEEPKNLVKTNCDLYEKLGEYGFQNAILVRYTQKAPQVSTPTLVE |
| | | AARNLGRVGTKCCTLPEDQRLPCVEDYLSAILNRVCLLHEKTPVSEHVTKCCSGSL |
| | | VERRPCFSALTVDETYVPKEFKAETFTFHSDICTLPEKEKQIKKQTALAELVKHKP |
| | | KATAEQLKTVMDDFAQFLDTCCKAADKDTCFSTEGPNLVTRCKDALAGGGSGGGSQ |
| | | YYDYDIPLFMYGQISPNCAPECNCPHSYPTAMYCDDLKLKSVPMVPPGIKYLYLRN |
| | | NQIDHIDEKAFENVTDLQWLILDHNLLENSKIKGKVFSKLKQLKKLHINYNNLTES |
| | | VGPLPKSLQDLQLTNNKISKLGSFDGLVNLTFIYLQHNQLKEDAVSASLKGLKSLE |
| | | YLDLSFNQMSKLPAGLPTSLLTLYLDNNKISNIPDEYFKRFTGLQYLRLSHNELAD |
| | | SGVPGNSFNISSLLELDLSYNKLKSIPTVNENLENYYLEVNELEKFDVKSFCKILG |
| | | PLSYSKIKHLRLDGNPLTQSSLPPDMYECLRVANEITVN [chemical structure] |
| 124 | Lumican- | QYYDYDIPLFMYGQISPNCAPECNCPHSYPTAMYCDDLKLKSVPMVPPGIKYLYLR |
| | GGGS-(H)₆ | NNQIDHIDEKAFENVTDLQWLILDHNLLENSKIKGKVFSKLKQLKKLHINYNNLTE |
| | | SVGPLPKSLQDLQLTNNKISKLGSFDGLVNLTFIYLQHNQLKEDAVSASLKGLKSL |
| | | EYLDLSFNQMSKLPAGLPTSLLTLYLDNNKISNIPDEYFKRFTGLQYLRLSHNELA |
| | | DSGVPGNSFNISSLLELDLSYNKLKSIPTVNENLENYYLEVNELEKFDVKSFCKIL |
| | | GPLSYSKIKHLRLDGNPLTQSSLPPDMYECLRVANEITVNGGGSHHHHHH |
| 125 | Lumican | QYYDYDIPLFMYGQISPNCAPECNCPHSYPTAMYCDDLKLKSVPMVPPGIKYLYLR |
| | D213A | NNQIDHIDEKAFENVTDLQWLILDHNLLENSKIKGKVFSKLKQLKKLHINYNNLTE |
| | | SVGPLPKSLQDLQLTNNKISKLGSFDGLVNLTFIYLQHNQLKEDAVSASLKGLKSL |
| | | EYLDLSFNQMSKLPAGLPTSLLTLYLANNKISNIPDEYFKRFTGLQYLRLSHNELA |
| | | DSGVPGNSFNISSLLELDLSYNKLKSIPTVNENLENYYLEVNELEKFDVKSFCKIL |
| | | GPLSYSKIKHLRLDGNPLTQSSLPPDMYECLRVANEITVNGGGSHHHHHH |
| 126 | Lumican-MSA | QYYDYDIPLFMYGQISPNCAPECNCPHSYPTAMYCDDLKLKSVPMVPPGIKYLYLR |
| | | NNQIDHIDEKAFENVTDLQWLILDHNLLENSKIKGKVFSKLKQLKKLHINYNNLTE |
| | | SVGPLPKSLQDLQLTNNKISKLGSFDGLVNLTFIYLQHNQLKEDAVSASLKGLKSL |
| | | EYLDLSFNQMSKLPAGLPTSLLTLYLDNNKISNIPDEYFKRFTGLQYLRLSHNELA |
| | | DSGVPGNSFNISSLLELDLSYNKLKSIPTVNENLENYYLEVNELEKFDVKSFCKIL |
| | | GPLSYSKIKHLRLDGNPLTQSSLPPDMYECLRVANEITVNGGGSGGGSEAHKSEIA |
| | | HRYNDLGEQHFKGLVLIAFSQYLQKCSYDEHAKLVQEVTDFAKTCVADESAANCDK |
| | | SLHTLFGDKLCAIPNLRENYGELADCCTKQEPERNECFLQHKDDNPSLPPFERPEA |
| | | EAMCTSFKENPTTFMGHYLHEVARRHPYFYAPELLYYAEQYNEILTQCCAEADKES |
| | | CLTPKLDGVKEKALVSSVRQRMKCSSMQKFGERAFKAWAVARLSQTFPNADFAEIT |
| | | KLATDLTKVNKECCHGDLLECADDRAELAKYMCENQATISSKLQTCCDKPLLKKAH |
| | | CLSEVEHDTMPADLPAIAADFVEDQEVCKNYAEAKDVFLGTFLYEYSRRHPDYSVS |
| | | LLLRLAKKYEATLEKCCAEANPPACYGTVLAEFQPLVEEPKNLVKTNCDLYEKLGE |
| | | YGFQNAILVRYTQKAPQVSTPTLVEAARNLGRVGTKCCTLPEDQRLPCVEDYLSAI |
| | | LNRVCLLHEKTPVSEHVTKCCSGSLVERRPCFSALTVDETYVPKEFKAETFTFHSD |
| | | ICTLPEKEKQIKKQTALAELVKHKPKATAEQLKTVMDDFAQFLDTCCKAADKDTCF |
| | | STEGPNLVTRCKDALAHHHHHH |
| 127 | Gluc | KPTENNEDFNIVAVASNFATTDLDADRGKLPGKKLPLEVLKEMEANARKAGCTRGC |
| | | LICLSHIKCTPKMKKFIPGRCHTYEGDKESAQGGIGEAIVDIPEIPGFKDLEPMEQ |
| | | FIAQVDLCVDCTTGCLKGLANVQCSDLLKKWLPQRCATFASKIQGQVDKIKGAGGD |
| | | GGGSHHHHHH |
| 128 | Lumican-Gluc | QYYDYDIPLFMYGQISPNCAPECNCPHSYPTAMYCDDLKLKSVPMVPPGIKYLYLR |
| | | NNQIDHIDEKAFENVTDLQWLILDHNLLENSKIKGKVFSKLKQLKKLHINYNNLTE |
| | | SVGPLPKSLQDLQLTNNKISKLGSFDGLVNLTFIYLQHNQLKEDAVSASLKGLKSL |
| | | EYLDLSFNQMSKLPAGLPTSLLTLYLDNNKISNIPDEYFKRFTGLQYLRLSHNELA |
| | | DSGVPGNSFNISSLLELDLSYNKLKSIPTVNENLENYYLEVNELEKFDVKSFCKIL |
| | | GPLSYSKIKHLRLDGNPLTQSSLPPDMYECLRVANEITVNGGGSGGGGGGGSKPTE |
| | | NNEDFNIVAVASNFATTDLDADRGKLPGKKLPLEVLKEMEANARKAGCTRGCLICL |
| | | SHIKCTPKMKKFIPGRCHTYEGDKESAQGGIGEAIVDIPEIPGFKDLEPMEQFIAQ |
| | | VDLCVDCTTGCLKGLANVQCSDLLKKWLPQRCATFASKIQGQVDKIKGAGGDGGGS |
| | | HHHHHH |
| 129 | CNA35-Gluc | ARDISSTNVTDLTVSPSKIEDGGKTTVKMTFDDKNGKIQNGDMIKVAWPTSGTVKI |
| | | EGYSKTVPLTVKGEQVGQAVITPDGATITFNDKVEKLSDVSGFAEFEVQGRNLTQT |
| | | NTSDDKVATITSGNKSTNVTVHKSEAGTSSVFYYKTGDMLPEDTTHVRWFLNINNE |
| | | KSYVSKDITIKDQIQGGQQLDLSTLNINVTGTHSNYYSGQSAITDFEKAFPGSKIT |
| | | VDNTKNTIDVTIPQGYGSYNSFSINYKTKITNEQQKEFVNNSQAWYQEHGKEEVNG |
| | | KSFNHTVHNINANAGIEGTVKGELKVLKQDKDTKGGGSGGGGGGGGKPTENNEDFN |
| | | IVAVASNFATTDLDADRGKLPGKKLPLEVLKEMEANARKAGCTRGCLICLSHIKCT |
| | | PKMKKFIPGRCHTYEGDKESAQGGIGEAIVDIPEIPGFKDLEPMEQFIAQVDLCVD |
| | | CTTGCLKGLANVQCSDLLKKWLPQRCATFASKIQGQVDKIKGAGGDGGGSHHHHHH |
| 130 | ColG s3s/s3b- | PITKEMEPNDDIKEANGPIVEGVTVKGDLNGSDDADTFYFDVKEDGDVTIELPYSG |
| | Gluc | SSNFTWLVYKEGDDQNHIASGIDKNNSKVGTFKSTKGRHYVFIYKHDSASNISYSL |
| | | NIKGLGNEKLKEKENNDSSDKATVIPNFNTTMQGSLLGDDSRDYYSFEVKEEGEVN |
| | | IELDKKDEFGVTWTLHPESNINDRITYGQVDGNKVSNKVKLRPGKYYLLVYKYSGS |
| | | GNYELRVNGGGSGGGSGGGSKPTENNEDFNIVAVASNFATTDLDADRGKLPGKKLP |
| | | LEVLKEMEANARKAGCTRGCLICLSHIKCTPKMKKFIPGRCHTYEGDKESAQGGIG |
| | | EAIVDIPEIPGFKDLEPMEQFIAQVDLCVDCTTGCLKGLANVQCSDLLKKWLPQRC |
| | | ATFASKIQGQVDKIKGAGGDGGGSHHHHHH |
| 131 | ColH_s3-Gluc | GTEKEPNNSKETASGPIVPGIPVSGTIENTSDQDYFYFDVITPGEVKIDINKLGYG |
| | | GATWVVYDENNNAVSYATDDGQNLSGKFKADKPGRYYIHLYMFNGSYMPYRINIEG |
| | | GGSGGGSGGGSKPTENNEDFNIVAVASNFATTDLDADRGKLPGKKLPLEVLKEMEA |
| | | NARKAGCTRGCLICLSHIKCTPKMKKFIPGRCHTYEGDKESAQGGIGEAIVDIPEI |
| | | PGFKDLEPMEQFIAQVDLCVDCTTGCLKGLANVQCSDLLKKWLPQRCATFASKIQG |
| | | QVDKIKGAGGDGGGSHHHHHH |
| 132 | PLGF2 HBD- | RRRPKGRGKRRREKQRPTDSHLGGGSGGGSGGGSKPTENNEDFNIVAVASNFATTD |
| | Gluc | LDADRGKLPGKKLPLEVLKEMEANARKAGCTRGCLICLSHIKCTPKMKKFIPGRCH |
| | | TYEGDKESAQGGIGEAIVDIPEIPGFKDLEPMEQFIAQVDLCVDCTTGCLKGLANV |
| | | QCSDLLKKWLPQRCATFASKIQGQVDKIKGAGGDGGGSHHHHHH |
| 133 | 4M5.3-MSA- | ADVVMTQTPLSLPVSLGDQASISCRSSQSLVHSNGNTYLRWYLQKPGQSPKVLIYK |
| | Lumican | VSNRVSGVPDRFSGSGSGTDFTLKINRVEAEDLGVYFCSQSTHVPWTFGGGTKLEI |
| | | KSSADDAKKDAAKKDDAKKDDAKKDGGVKLDETGGGLVQPGGAMKLSCVTSGFTFG |
| | | HYWMNWVRQSPEKGLEWVAQFRNKPYNYETYYSDSVKGRFTISRDDSKSSVYLQMN |
| | | NLRVEDTGIYYCTGASYGMEYLGQGTSVTVSGGGSEAHKSEIAHRYNDLGEQHFKG |
| | | LVLIAFSQYLQKCSYDEHAKLVQEVTDFAKTCVADESAANCDKSLHTLFGDKLCAI |
| | | PNLRENYGELADCCTKQEPERNECFLQHKDDNPSLPPFERPEAEAMCTSFKENPTT |
| | | FMGHYLHEVARRHPYFYAPELLYYAEQYNEILTQCCAEADKESCLTPKLDGVKEKA |
| | | LVSSVRQRMKCSSMQKFGERAFKAWAVARLSQTFPNADFAEITKLATDLTKVNKEC |
| | | CHGDLLECADDRAELAKYMCENQATISSKLQTCCDKPLLKKAHCLSEVEHDTMPAD |
| | | LPAIAADFVEDQEVCKNYAEAKDVFLGTFLYEYSRRHPDYSVSLLLRLAKKYEATL |
| | | EKCCAEANPPACYGTVLAEFQPLVEEPKNLVKTNCDLYEKLGEYGFQNAILVRYTQ |
| | | KAPQVSTPTLVEAARNLGRVGTKCCTLPEDQRLPCVEDYLSAILNRVCLLHEKTPV |
| | | SEHVTKCCSGSLVERRPCFSALTVDETYVPKEFKAETFTFHSDICTLPEKEKQIKK |
| | | QTALAELVKHKPKATAEQLKTVMDDFAQFLDTCCKAADKDTCFSTEGPNLVTRCKD |
| | | ALAGGGSGGGSQYYDYDIPLFMYGQISPNCAPECNCPHSYPTAMYCDDLKLKSVPM |
| | | VPPGIKYLYLRNNQIDHIDEKAFENVTDLQWLILDHNLLENSKIKGKVFSKLKQLK |
| | | KLHINYNNLTESVGPLPKSLQDLQLTNNKISKLGSFDGLVNLTFIYLQHNQLKEDA |
| | | VSASLKGLKSLEYLDLSFNQMSKLPAGLPTSLLTLYLDNNKISNIPDEYFKRFTGL |
| | | QYLRLSHNELADSGVPGNSFNISSLLELDLSYNKLKSIPTVNENLENYYLEVNELE |
| | | KFDVKSFCKILGPLSYSKIKHLRLDGNPLTQSSLPPDMYECLRVANEITVNGGGSH |
| | | HHHHH |
| 134 | Ss07d-MSA- | ATVKFKYKGEEKQVDISKIYLVLRLGKFIYFYYDLGGGKLGLGHVSEKDAPKELLQ |
| | Lumican | MLEKQKKGGGSEAHKSEIAHRYNDLGEQHFKGLVLIAFSQYLQKCSYDEHAKLVQE |
| | | VTDFAKTCVADESAANCDKSLHTLFGDKLCAIPNLRENYGELADCCTKQEPERNEC |
| | | FLQHKDDNPSLPPFERPEAEAMCTSFKENPTTFMGHYLHEVARRHPYFYAPELLYY |
| | | AEQYNEILTQCCAEADKESCLTPKLDGVKEKALVSSVRQRMKCSSMQKFGERAFKA |
| | | WAVARLSQTFPNADFAEITKLATDLTKVNKECCHGDLLECADDRAELAKYMCENQA |
| | | TISSKLQTCCDKPLLKKAHCLSEVEHDTMPADLPAIAADFVEDQEVCKNYAEAKDV |
| | | FLGTFLYEYSRRHPDYSVSLLLRLAKKYEATLEKCCAEANPPACYGTVLAEFQPLV |
| | | EEPKNLVKTNCDLYEKLGEYGFQNAILVRYTQKAPQVSTPTLVEAARNLGRVGTKC |
| | | CTLPEDQRLPCVEDYLSAILNRVCLLHEKTPVSEHVTKCCSGSLVERRPCFSALTV |
| | | DETYVPKEFKAETFTFHSDICTLPEKEKQIKKQTALAELVKHKPKATAEQLKTVMD |
| | | DFAQFLDTCCKAADKDTCFSTEGPNLVTRCKDALAGGGSGGGSQYYDYDIPLFMYG |
| | | QISPNCAPECNCPHSYPTAMYCDDLKLKSVPMVPPGIKYLYLRNNQIDHIDEKAFE |
| | | NVTDLQWLILDHNLLENSKIKGKVFSKLKQLKKLHINYNNLTESVGPLPKSLQDLQ |
| | | LTNNKISKLGSFDGLVNLTFIYLQHNQLKEDAVSASLKGLKSLEYLDLSFNQMSKL |
| | | PAGLPTSLLTLYLDNNKISNIPDEYFKRFTGLQYLRLSHNELADSGVPGNSFNISS |
| | | LLELDLSYNKLKSIPTVNENLENYYLEVNELEKFDVKSFCKILGPLSYSKIKHLRL |
| | | DGNPLTQSSLPPDMYECLRVANEITVNGGGSHHHHHH |
| 135 | ZZ-MSA | MRVPAQLLGLLLLWLPGARCAVDNKFNKEQQNAFYEILHLPNLNEEQRNAFIQSLK |
| | Lumican | DPPSQSANLLAEAKKLNDAQAPKVDNKFNKEQQNAFYEILHLPNLNEEQRNAFIQS |
| | | LKDDPSQSANLLAEAKKLNDAQAPKGGGSEAHKSEIAHRYNDLGEQHFKGLVLIAF |
| | | SQYLQKCSYDEHAKLVQEVTDFAKTCVADESAANCDKSLHTLFGDKLCAIPNLREN |
| | | YGELADCCTKQEPERNECFLQHKDDNPSLPPFERPEAEAMCTSFKENPTTFMGHYL |
| | | HEVARRHPYFYAPELLYYAEQYNEILTQCCAEADKESCLTPKLDGVKEKALVSSVR |
| | | QRMKCSSMQKFGERAFKAWAVARLSQTFPNADFAEITKLATDLTKVNKECCHGDLL |
| | | ECADDRAELAKYMCENQATISSKLQTCCDKPLLKKAHCLSEVEHDTMPADLPAIAA |
| | | DFVEDQEVCKNYAEAKDVFLGTFLYEYSRRHPDYSVSLLLRLAKKYEATLEKCCAE |
| | | ANPPACYGTVLAEFQPLVEEPKNLVKTNCDLYEKLGEYGFQNAILVRYTQKAPQVS |
| | | TPTLVEAARNLGRVGTKCCTLPEDQRLPCVEDYLSAILNRVCLLHEKTPVSEHVTK |
| | | CCSGSLVERRPCFSALTVDETYVPKEFKAETFTFHSDICTLPEKEKQIKKQTALAE |
| | | LVKHKPKATAEQLKTVMDDFAQFLDTCCKAADKDTCFSTEGPNLVTRCKDALAGGG |
| | | SGGGSQYYDYDIPLFMYGQISPNCAPECNCPHSYPTAMYCDDLKLKSVPMVPPGIK |
| | | YLYLRNNQIDHIDEKAFENVTDLQWLILDHNLLENSKIKGKVFSKLKQLKKLHINY |
| | | NNLTESVGPLPKSLQDLQLTNNKISKLGSFDGLVNLTFIYLQHNQLKEDAVSASLK |
| | | GLKSLEYLDLSFNQMSKLPAGLPTSLLTLYLDNNKISNIPDEYFKRFTGLQYLRLS |
| | | HNELADSGVPGNSFNISSLLELDLSYNKLKSIPTVNENLENYYLEVNELEKFDVKS |
| | | FCKILGPLSYSKIKHLRLDGNPLTQSSLPPDMYECLRVANEITVNGGGSHHHHHH |
| 136 | Lumican- | QYYDYDIPLFMYGQISPNCAPECNCPHSYPTAMYCDDLKLKSVPMVPPGIKYLYLR |
| | MSA-FcIII4C | NNQIDHIDEKAFENVTDLQWLILDHNLLENSKIKGKVFSKLKQLKKLHINYNNLTE |
| | | SVGPLPKSLQDLQLTNNKISKLGSFDGLVNLTFIYLQHNQLKEDAVSASLKGLKSL |
| | | EYLDLSFNQMSKLPAGLPTSLLTLYLDNNKISNIPDEYFKRFTGLQYLRLSHNELA |
| | | DSGVPGNSFNISSLLELDLSYNKLKSIPTVNENLENYYLEVNELEKFDVKSFCKIL |
| | | GPLSYSKIKHLRLDGNPLTQSSLPPDMYECLRVANEITVNGGGSGGGSEAHKSEIA |
| | | HRYNDLGEQHFKgLVLIAFSQYLQKCSYDEHAKLVQEVTDFAKTCVADESAANCDK |
| | | SLHTLFGDKLCAIPNLRENYGELADCCTKQEPERNECFLQHKDDNPSLPPFERPEA |
| | | EAMCTSFKENPTIFMGHYLHEVARRHPYFYAPELLYYAEQYNEILFQCCAEADKES |
| | | CLTPKLDGVKEKALVSSVRQRMKCSSMQKFGERAFKAWAVARLSQTFPNADFAEIT |
| | | KLATDLTKVNKECCHGDLLECADDRAELAKYMCENQATISSKLQTCCDKPLLKKAH |
| | | CLSEVEHDTMPADLPAIAADFVEDQEVCKNYAEAKDVFLGTFLYEYSRRHPDYSVS |
| | | LLLRLAKKYEATLEKCCAEANPPACYGTVLAEFQPLVEEPKNLVKTNCDLYEKLGE |
| | | YGFQNAILVRYTQKAPQVSTPTLVEAARNLGRVGTKCCTLPEDQRLPCVEDYLSAI |
| | | LNRVCLLHEKTPVSEHVTKCCSGSLVERRPCFSALTVDETYVPKEFKAETFTFHSD |
| | | ICTLPEKEKQIKKQTALAELVKHKPKATAEQLKTVMDDFAQFLDTCCKAADKDTCF |
| | | STEGPNLVTRCKDALAGGGSCDCAWHLGELVWCTCHHHHHH |
| 137 | Lumican-MSA-Fn3 | QYYDYDIPLFMYGQISPNCAPECNCPHSYPTAMYCDDLKLKSVPMVPPGIKYLYLR |
| | | NNQIDHIDEKAFENVTDLQWLILDHNLLENSKIKGKVFSKLKQLKKLHINYNNLTE |
| | | SVGPLPKSLQDLQLTNNKISKLGSFDGLVNLTFIYLQHNQLKEDAVSASLKGLKSL |
| | | EYLDLSFNQMSKLPAGLPTSLLTLYLDNNKISNIPDEYFKRFTGLQYLRLSHNELA |
| | | DSGVPGNSFNISSLLELDLSYNKLKSIPTVNENLENYYLEVNELEKFDVKSFCKIL |
| | | GPLSYSKIKHLRLDGNPLTQSSLPPDMYECLRVANEITVNGGGSGGGSEAEKSEIA |
| | | HRYNDLGEQHFKGLVLIAFSQYLQKCSYDEHAKLVQEVTDFAKTCVADESAANCDK |
| | | SLHTLFGDKLCAIPNLRENYGELADCCTKQEPERNECFLQHKDDNPSLPPFERPEA |
| | | EAMCTSFKENPTTFMGHYLHEVARRHPYFYAPELLYYAEQYNEILEQCCAEADKES |
| | | CLTPKLDGVKEKALVSSVRQRMKCSSMQKFGERAFKAWAVARLSQEFPNADFAEIT |
| | | KLATDLTKVNKECCHGDLLECADDRAELAKYMCENQATISSKLQTCCDKPLLKKAH |
| | | CLSEVEHDTMPADLPAIAADFVEDQEVCKNYAEAKDVFLGTFLYEYSRRHPDYSVS |
| | | LLLRLAKKYEATLEKCCAEANPPACYGTVLAEFQPLVEEPKNLVKTNCDLYEKLGE |
| | | YGFQNAILVRYTQKAPQVSTPTLVEAARNLGRVGTKCCTLPEDQRLPCVEDYLSAI |
| | | LNRVCLLHEKTPVSEHVTKCCSGSLVERRPCFSALTVDETYVPKEFKAETFTFHSD |
| | | ICTLPEKEKQIKKQTALAELVKHKPKATAEQLKTVMDDFAQFLDTCCKAADKDTCF |
| | | STEGPNLVTRCKDALAGGGSVSDVPRDLEVVAATPTSLLISWCCSDNCSNSYRITY |
| | | GETGGNSPVQEFTVPRSCFMATISGLKPGVDYTITAYAVTDSNGPHPISINYRTHH |
| | | HHHH |
| 138 | Lumican-MSA- | QYYDYDIPLFMYGQISPNCAPECNCPHSYPTAMYCDDLKLKSVPMVPPGIKYLYLR |
| | SpG2 | NNQIDHIDEKAFENVTDLQWLILDHNLLENSKIKGKVFSKLKQLKKLHINYNNLTE |
| | | SVGPLPKSLQDLQLTNNKISKLGSFDGLVNLTFIYLQHNQLKEDAVSASLKGLKSL |
| | | EYLDLSFNQMSKLPAGLPTSLLTLYLDNNKISNIPDEYFKRFTGLQYLRLSHNELA |
| | | DSGVPGNSFNISSLLELDLSYNKLKSIPTVNENLENYYLEVNELEKFDVKSFCKIL |
| | | GPLSYSKIKHLRLDGNPLTQSSLPPDMYECLRVANEITVNGGGSGGGSEAHKSEIA |
| | | HRYNDLGEQHFKGLVLIAFSQYLQKCSYDEHAKLVQEVTDFAKTCVADESAANCDK |
| | | SLHTLFGDKLCAIPNLRENYGELADCCTKQEPERNECFLQHKDDNPSLPPFERPEA |
| | | EAMCTSFKENPTTFMGHYLHEVARRHPYFYAPELLYYAEQYNEILTQCCAEADKES |
| | | CLTPKLDGVKEKALVSSVRQRMKCSSMQKFGERAFKAWAVARLSQTFPNADFAEIT |
| | | KLATDLTKVNKECCHGDLLECADDRAELAKYMCENQATISSKLQTCCDKPLLKKAH |
| | | CLSEVEHDTMPADLPAIAADFVEDQEVCKNYAEAKDVFLGTFLYEYSRRHPDYSVS |
| | | LLLRLAKKYEATLEKCCAEANPPACYGTVLAEFQPLVEEPKNLVKTNCDLYEKLGE |
| | | YGFQNAILVRYTQKAPQVSTPTLVEAARNLGRVGTKCCTLPEDQRLPCVEDYLSAI |
| | | LNRVCLLHEKTPVSEHVTKCCSGSLVERRPCFSALTVDETYVPKEFKAETFTFHSD |
| | | ICTLPEKEKQIKKQTALAELVKHKPKATAEQLKTVMDDFAQFLDTCCKAADKDTCF |
| | | STEGPNLVTRCKDALAGGGSTYKLVINGKTLKGETTTEAVDAATAEKVFKQYANDY |
| | | GVDGEWTYDDATKTFTVTEKPEVIDASELTPAVTTYKLVINGKTLKGETTTKAVDA |
| | | ETAEKAFKQYANDYGVDGVWTYDDATKTFTVTEHHHHHH |
| 139 | Lumican-MSA- | QYYDYDIPLFMYGQISPNCAPECNCPHSYPTAMYCDDLKLKSVPMVPPGIKYLYLR |
| | RRGW | NNQIDHIDEKAFENVTDLQWLILDHNLLENSKIKGKVFSKLKQLKKLHINYNNLTE |
| | | SVGPLPKSLQDLQLTNNKISKLGSFDGLVNLTFIYLQHNQLKEDAVSASLKGLKSL |
| | | EYLDLSFNQMSKLPAGLPTSLLTLYLDNNKISNIPDEYFKRFTGLQYLRLSHNELA |
| | | DSGVPGNSFNISSLLELDLSYNKLKSIPTVNENLENYYLEVNELEKFDVKSFCKIL |
| | | GPLSYSKIKHLRLDGNPLTQSSLPPDMYECLRVANEITVNGGGSGGGSEAHKSEIA |
| | | HRYNDLGEQHFKGLVLIAFSQYLQKCSYDEHAKLVQEVTDFAKTCVADESAANCDK |
| | | SLHTLFGDKLCAIPNLRENYGELADCCTKQEPERNECFLQHKDDNPSLPPFERPEA |
| | | EAMCTSFKENPTTFMGHYLHEVARRHPYFYAPELLYYAEQYNEILFQCCAEADKES |
| | | CLTPKLDGVKEKALVSSVRQRMKCSSMQKFGERAFKAWAVARLSQTFPNADFAEIT |
| | | KLATDLTKVNKECCHGDLLECADDRAELAKYMCENQATISSKLQTCCDKPLLKKAH |
| | | CLSEVEHDTMPADLPAIAADFVEDQEVCKNYAEAKDVFLGTFLYEYSRRHPDYSVS |
| | | LLLRLAKKYEATLEKCCAEANPPACYGTVLAEFQPLVEEPKNLVKTNCDLYEKLGE |
| | | YGFQNAILVRYTQKAPQVSTPTLVEAARNLGRVGTKCCTLPEDQRLPCVEDYLSAI |
| | | LNRVCLLHEKTPVSEHVTKCCSGSLVERRPCFSALTVDETYVPKEFKAETFTFHSD |
| | | ICTLPEKEKQIKKQTALAELVKHKPKATAEQLKTVMDDFAQFLDTCCKAADKDTCF |
| | | STEGPNLVTRCKDALAGGGSRRGWHHHHHH |
| 140 | Lumican- | QYYDYDIPLFMYGQISPNCAPECNCPHSYPTAMYCDDLKLKSVPMVPPGIKYLYLR |
| | MSA-WGRR | NNQIDHIDEKAFENVTDLQWLILDHNLLENSKIKGKVFSKLKQLKKLHINYNNLTE |
| | | SVGPLPKSLQDLQLTNNKISKLGSFDGLVNLTFIYLQHNQLKEDAVSASLKGLKSL |
| | | EYLDLSFNQMSKLPAGLPTSLLTLYLDNNKISNIPDEYFKRFTGLQYLRLSHNELA |
| | | DSGVPGNSFNISSLLELDLSYNKLKSIPTVNENLENYYLEVNELEKFDVKSFCKIL |
| | | GPLSYSKIKHLRLDGNPLTQSSLPPDMYECLRVANEITVNGGGSGGGSEAHKSEIA |
| | | HRYNDLGEQHFKGLVLIAFSQYLQKCSYDEHAKLVQEVTDFAKTCVADESAANCDK |
| | | SLHTLFGDKLCAIPNLRENYGELADCCTKQEPERNECFLQHKDDNPSLPPFERPEA |
| | | EAMCTSFKENPTTFMGHYLHEVARRHPYFYAPELLYYAEQYNEILTQCCAEADKES |
| | | CLTPKLDGVKEKALVSSVRQRMKCSSMQKFGERAFKAWAVARLSQEFPNADFAEIT |
| | | KLATDLTKVNKECCHGDLLECADDRAELAKYMCENQATISSKLQTCCDKPLLKKAH |
| | | CLSEVEHDTMPADLPAIAADFVEDQEVCKNYAEAKDVFLGTFLYEYSRRHPDYSVS |
| | | LLLRLAKKYEATLEKCCAEANPPACYGTVLAEFQPLVEEPKNLVKTNCDLYEKLGE |
| | | YGFQNAILVRYTQKAPQVSTPTLVEAARNLGRVGTKCCTLPEDQRLPCVEDYLSAI |
| | | LNRVCLLHEKTPVSEHVTKCCSGSLVERRPCFSALTVDETYVPKEFKAETFTFHSD |
| | | ICTLPEKEKQIKKQTALAELVKHKPKATAEQLKTVMDDFAQFLDTCCKAADKDTCF |
| | | STEGPNLVTRCKDALAGGGSWGRRHHHHHH |
| 141 | 4420 LC- | DVVMTQTPLSLPVSLGDQASISCRSSQSLVHSNGNTYLRWYLQKPGQSPKVLIYKV |
| | murine kappa | SNRFSGVPDRFSGSGSGTDFTLKISRVEAEDLGVYFCSQSTHVPWTFGGGTKLEIK |
| | chain | RADAAPTVSIFPPSSEQLTSGGASVVCFLNNFYPKDINVKWKIDGSERQNGVLNSW |
| | | TDQDSKDSTYSMSSTLTLTKDEYERHNSYTCEATHKTSTSPIVKSFNRNEC |
| 142 | 4420 HC- | DVKLDETGGGLVQPGRPMKLSCVASGFTFSDYWMNWVRQSPEKGLEWVAQIRNKPY |
| | Lumican | NYETYYSDSVKGRFTISRDDSKSSVYLQMNNLRVEDMGIYYCTGSYYGMDYWGQGT |
| | (LALA-PG) | SVTVSAKTTAPSVYPLAPVCGGTTGSSVTLGCLVKGYFPEPVTLTWNSGSLSSGVH |
| | | TFPALLQSGLYTLSSSVTVTSNTWPSQTITCNVAHPASSTKVDKKIEPRVPITQNP |
| | | CPPLKECPPCAAPDAAGGPSVFIFPPKIKDVLMISLSPMVTCVVVDVSEDDPDVQI |
| | | SWFVNNVEVHTAQTQTHREDYNSTLRVVSALPIQHQDWMSGKEFKCKVNNRALGSP |
| | | IEKTISKPRGPVRAPQVYVLPPPAEEMTKKEFSLTCMITGFLPAEIAVDWTSNGRT |
| | | EQNYKNTATVLDSDGSYFMYSKLRVQKSTWERGSLFACSVVHEGLHNHLTTKTISR |
| | | [chemical structure] |
| 143 | 4220 HC- | DVKLDETGGGLVQPGRPMKLSCVASGFTFSDYWMNWVRQSPEKGLEWVAQIRNKPY |
| | mIgG2c | NYETYYSDSVKGRFTISRDDSKSSVYLQMNNLRVEDMGIYYCTGSYYGMDYWGQGT |
| | | SVTVSAKTTAPSVYPLAPVCGGTTGSSVTLGCLVKGYFPEPVTLTWNSGSLSSGVH |
| | | TFPALLQSGLYTLSSSVTVTSNTWPSQTITCNVAHPASSTKVDKKIEPRVPITQNP |
| | | CPPLKECPPCAAPDAAGGPSVFIFPPKIKDVLMISLSPMVTCVVVDVSEDDPDVQI |
| | | SWFVNNVEVHTAQTQTHREDYNSTLRVVSALPIQHQDWMSGKEFKCKVNNRALGSP |
| | | IEKTISKPRGPVRAPQVYVLPPPAEEMTKKEFSLTCMITGFLPAEIAVDWTSNGRT |
| | | EQNYKNTATVLDSDGSYFMYSKLRVQKSTWERGSLFACSVVHEGLHNHLTTKTISR |
| | | SLGK |
| 144 | 3/23 LC- | METDTLLLWVLLLWVPGSTGDTVLTQSPALAVSPGERVTISCRASESVSTRMHWYQ |
| | murine kappa | QRPGQPPKLLIYVASRLESGVPARFSGGGSGTDFTLTIDPVEANDTATYFCQQSWN |
| | | DPWTFGGGTKLELKRADAAPTVSIFPPSSEQLTSGGASVVCFLNNFYPKDINVKWK |
| | | IDGSERQNGVLNSWTDQDSKDSTYSMSSTLTLTKDEYERHNSYTCEATHKTSTSPI |
| | | VKSFNRNEC |
| 145 | 3/23 HC- | MDIWLSLVFLVLFIKGVQCEVQLVESGGGLVQPGRSLKLSCAASGFTLSDYYMAWV |
| | lumican | RQAPKKGLEWVASINYEGSSTYYGESVKGRFTISRDNAKSTLYLQMNSLRSEDTAT |
| | | YYCVRHDNYFDYWGQGVLVTVSSAKTTAPSVYPLAPVCGGTTGSSVTLGCLVKGYF |
| | | PEPVTLTWNSGSLSSGVHTFPALLQSGLYTLSSSVTVTSNTWPSQTITCNVAHPAS |
| | | STKVDKKIEPRVPITQNPCPPLKECPPCAAPDAAGGPSVFIFPPKIKDVLMISLSP |
| | | MVTCVVVDVSEDDPDVQISWFVNNVEVHTAQTQTHREDYNSTLRVVSALPIQHQDW |
| | | MSGKEFKCKVNNRALGSPlEKTISKPRGPVRAPQVYVLPPPAEEMTKKEFSLTCMI |
| | | TGFLPAEIAVDWTSNGRTEQNYKNTATVLDSDGSYFMYSKLRVQKSTWERGSLFAC |
| | | [chemical structure] |
| 146 | LOB12.3 LC- | DIQMTQSPASLSASLEEIVTITCQASQDIGNWLAWYHQKPGKSPQLLIYGSTSLAD |
| | murine kappa | GVPSRFSGSSSGSQYSLKISRLQVEDIGIYYCLQAYGAPWTFGGGTKLELKRADAA |
| | | PTVSIFPPSSEQLTSGGASVVCFLNNFYPKDINVKWKIDGSERQNGVLNSWTDQDS |
| | | KDSTYSMSSTLTLTKDEYERHNSYTCEATHKTSTSPIVKSFNRNEC |
| 147 | LOB12.3 HC- | DVQLVESGGGLVQPGRSLKLSCAASGFIFSYFDMAWVRQAPTKGLEWVASISPDGS |
| | Lumican | IPYYRDSVKGRFTVSRENAKSSLYLQMDSLRSEDTATYYCARRSYGGYSEIDYWGQ |
| | | GVMVTVSSAKTTAPSVYPLAPVCGGTTGSSVTLGCLVKGYFPEPVTLTWNSGSLSS |
| | | GVHTFPALLQSGLYTLSSSVTVTSNTWPSQTITCNVAHPASSTKVDKKIEPRVPIT |
| | | QNPCPPLKECPPCAAPDAAGGPSVFIFPPKIKDVLMISLSPMVTCVVVDVSEDDPD |
| | | VQISWFVNNVEVHTAQTQTHREDYNSTLRVVSALPIQHQDWMSGKEFKCKVNNRAL |
| | | GSPIEKTISKPRGPVRAPQVYVLPPPAEEMTKKEFSLTCMITGFLPAEIAVDWTSN |
| | | GRTEQNYKNTATVLDSDGSYFMYSKLRVQKSTWERGSLFACSVVHEGLHNHLTTKT |
| | | [chemical structure] |
| 148 | OX86 LC- | DIVMTQGALPNPVPSGESASITCRSSQSLVYKDGQTYLNWFLQRPGQSPQLLTYWM |
| | murine kappa | STRASGVSDRFSGSGSGTYFTLKISRVRAEDAGVYYCQQVREYPFTFGSGTKLEIK |
| | | RADAAPTVSIFPPSSEQLTSGGASVVCFLNNFYPKDINVKWKIDGSERQNGVLNSW |
| | | TDQDSKDSTYSMSSTLTLTKDEYERHNSYTCEATHKTSTSPIVKSFNRNEC |
| 149 | OX86 HC- | QVQLKESGPGLVQPSQTLSLTCTVSGFSLTGYNLHWVRQPPGKGLEWMGRMRYDGD |
| | Lumican | TYYNSVLKSRLSISRDTSKNQVFLKMNSLQTDDTAIYYCTRDGRGDSFDYWGQGVM |
| | | VTVSSAKTTAPSVYPLAPVCGGTTGSSVTLGCLVKGYFPEPVTLTWNSGSLSSGVH |
| | | TFPALLQSGLYTLSSSVTVTSNTWPSQTITCNVAHPASSTKVDKKIEPRVPITQNP |
| | | CPPLKECPPCAAPDAAGGPSVFIFPPKIKDVLMISLSPMVTCVVVDVSEDDPDVQI |
| | | SWFVNNVEVHTAQTQTHREDYNSTLRVVSALPIQHQDWMSGKEFKCKVNNRALGSP |
| | | IEKTISKPRGPVRAPQVYVLPPPAEEMTKKEFSLTCMITGFLPAEIAVDWTSNGRT |
| | | EQNYKNTATVLDSDGSYFMYSKLRVQKSTWERGSLFACSVVHEGLHNHLTTKTISR |
| | | [chemical structure] |
| 150 | 2C11 LC- | DIQMTQSPSSLPASLGDRVTINCQASQDISNYLNWYQQKPGKAPKLLIYYTNKLAD |
| | murine kappa | GVPSRFSGSGSGRDSSFTISSLESEDIGSYYCQQYYNYPWTFGPGTKLEIKRRADA |
| | | APTVSIFPPSSEQLTSGGASVVCFLNNFYPKDINVKWKIDGSERQNGVLNSWTDQD |
| | | SKDSTYSMSSTLTLTKDEYERHNSYTCEATHKTSTSPIVKSFNRNEC |
| 151 | 2C11 HC- | EVQLVESGGGLVQPGKSLKLSCEASGFTFSGYGMHWVRQAPGRGLESVAYITSSSI |
| | lumican | NIKYADAVKGRFTVSRDNAKNLLFLQMNILKSEDTAMYYCARFDWDKNYWGQGTMV |
| | | TVSSAKTTAPSVYPLAPVCGGTTGSSVTLGCLVKGYFPEPVTLTWNSGSLSSGVHT |
| | | FPALLQSGLYTLSSSVTVTSNTWPSQTITCNVAHPASSTKVDKKIEPRVPITQNPC |
| | | PPLKECPPCAAPDAAGGPSVFIFPPKIKDVLMISLSPMVTCVVVDVSEDDPDVQIS |
| | | WFVNNVEVHTAQTQTHREDYNSTLRVVSALPIQHQDWMSGKEFKCKVNNRALGSPI |
| | | EKTISKPRGPVRAPQVYVLPPPAEEMTKKEFSLTCMITGFLPAEIAVDWTSNGRTE |
| | | QNYKNTATVLDSDGSYFMYSKLRVQKSTWERGSLFACSVVHEGLHNHLTTKTISRS |
| | | [chemical structure] |
| 152 | T2A peptide | [symbol] |
| | (furin cleavage | RRKRGSGEGRGSLLTCGDVEENPGP |
| | site-GSG-T2A) | |
| 153 | CCL3- | APYGADTPTACCFSYSRKIPRQFIVDYFETSSLCSQPGVIFLTKRNRQICADSKET |
| | Lumican | WVQEYITDLELNAGGGSGGGSGGGSQYYDYDIPLFMYGQISPNCAPECNCPHSYPT |
| | | AMYCDDLKLKSVPMVPPGIKYLYLRNNQIDHIDEKAFENVTDLQWLILDHNLLENS |
| | | KIKGKVFSKLKQLKKLHINYNNLTESVGPLPKSLQDLQLTNNKISKLGSFDGLVNL |
| | | TFIYLQHNQLKEDAVSASLKGLKSLEYLDLSFNQMSKLPAGLPTSLLTLYLDNNKI |
| | | SNIPDEYFKRFTGLQYLRLSHNELADSGVPGNSFNISSLLELDLSYNKLKSIPTVN |
| | | ENLENYYLEVNELEKFDVKSFCKILGPLSYSKIKHLRLDGNPLTQSSLPPDMYECL |
| | | RVANEITVNGGGSHHHHHH |
| 154 | Lumican- | QYYDYDIPLFMYGQISPNCAPECNCPHSYPTAMYCDDLKLKSVPMVPPGIKYLYLR |
| | CCL3 | NNQIDHIDEKAFENVTDLQWLILDHNLLENSKIKGKVFSKLKQLKKLHINYNNLTE |
| | | SVGPLPKSLQDLQLTNNKISKLGSFDGLVNLTFIYLQHNQLKEDAVSASLKGLKSL |
| | | EYLDLSFNQMSKLPAGLPTSLLTLYLDNNKISNIPDEYFKRFTGLQYLRLSHNELA |
| | | DSGVPGNSFNISSLLELDLSYNKLKSIPTVNENLENYYLEVNELEKFDVKSFCKIL |
| | | GPLSYSKIKHLRLDGNPLTQSSLPPDMYECLRVANEITVNGGGSGGGSGGGSAPYG |
| | | ADTPTACCFSYSRKIPRQFIVDYFETSSLCSQPGVIFLTKRNRQICADSKETWVQE |
| | | YITDLELNAGGGSHHHHHH |
| 155 | CCL3 | APYGADTPTACCFSYSRKIPRQFIVDYFETSSLCSQPGVIFLTKRNRQICADSKET |
| | | WVQEYITDLELNAGGGSHHHHHH |
| 156 | CCL4- | APMGSDPPTSCCFSYTSRQLHRSFVMDYYETSSLCSKPAVVFLTKRGRQICANPSE |
| | lumican | PWVTEYMSDLELNGGGSGGGSGGGSQYYDYDIPLFMYGQISPNCAPECNCPHSYPT |
| | | AMYCDDLKLKSVPMVPPGIKYLYLRNNQIDHIDEKAFENVTDLQWLILDHNLLENS |
| | | KIKGKVFSKLKQLKKLHINYNNLTESVGPLPKSLQDLQLTNNKISKLGSFDGLVNL |
| | | TFIYLQHNQLKEDAVSASLKGLKSLEYLDLSFNQMSKLPAGLPTSLLTLYLDNNKI |
| | | SNIPDEYFKRFTGLQYLRLSHNELADSGVPGNSFNISSLLELDLSYNKLKSIPTVN |
| | | ENLENYYLEVNELEKFDVKSFCKILGPLSYSKIKHLRLDGNPLTQSSLPPDMYECL |
| | | RVANEITVNGGGSHHHHHH |
| 157 | Lumican- | QYYDYDIPLFMYGQISPNCAPECNCPHSYPTAMYCDDLKLKSVPMVPPGIKYLYLR |
| | CCL4 | NNQIDHIDEKAFENVTDLQWLILDHNLLENSKIKGKVFSKLKQLKKLHINYNNLTE |
| | | SVGPLPKSLQDLQLTNNKISKLGSFDGLVNLTFIYLQHNQLKEDAVSASLKGLKSL |
| | | EYLDLSFNQMSKLPAGLPTSLLTLYLDNNKISNIPDEYFKRFTGLQYLRLSHNELA |
| | | DSGVPGNSFNISSLLELDLSYNKLKSIPTVNENLENYYLEVNELEKFDVKSFCKIL |
| | | GPLSYSKIKHLRLDGNPLTQSSLPPDMYECLRVANEITVNGGGSGGGSGGGSAPMG |
| | | SDPPTSCCFSYTSRQLHRSFVMDYYETSSLCSKPAVVFLTKRGRQICANPSEPWVT |
| | | EYMSDLELNGGGSHHHHHH |
| 158 | CCL4 | APMGSDPPTSCCFSYTSRQLHRSFVMDYYETSSLCSKPAVVFLTKRGRQICANPSE |
| | | PWVTEYMSDLELNGGGSHHHHHH |
| 159 | CCL5- | SPYGSDTTPCCFAYLSLALPRAHVKEYFYTSSKCSNLAVVFVTRRNRQVCANPEKK |
| | lumican | WVQEYINYLEMSGGGSGGGSGGGSQYYDYDIPLFMYGQISPNCAPECNCPHSYPTA |
| | | MYCDDLKLKSVPMVPPGIKYLYLRNNQIDHIDEKAFENVTDLQWLILDHNLLENSK |
| | | IKGKVFSKLKQLKKLHINYNNLTESVGPLPKSLQDLQLTNNKISKLGSFDGLVNLT |
| | | FIYLQHNQLKEDAVSASLKGLKSLEYLDLSFNQMSKLPAGLPTSLLTLYLDNNKIS |
| | | NIPDEYFKRFTGLQYLRLSHNELADSGVPGNSFNISSLLELDLSYNKLKSIPTVNE |
| | | NLENYYLEVNELEKFDVKSFCKILGPLSYSKIKHLRLDGNPLTQSSLPPDMYECLR |
| | | VANEITVNGGGSHHHHHH |
| 160 | Lumican- | QYYDYDIPLFMYGQISPNCAPECNCPHSYPTAMYCDDLKLKSVPMVPPGIKYLYLR |
| | CCL5 | NNQIPHIDEKAFENVTDLQWLILDHNLLENSKIKGKVFSKLKQLKKLHINYNNLTE |
| | | SVGPLPKSLQDLQLTNNKISKLGSFDGLVNLTFIYLQHNQLKEDAVSASLKGLKSL |
| | | EYLDLSFNQMSKLPAGLPTSLLTLYLDNNKISNIPDEYFKRFTGLQYLRLSHNELA |
| | | DSGVPGNSFNISSLLELDLSYNKLKSIPTVNENLENYYLEVNELEKFDVKSFCKIL |
| | | GPLSYSKIKHLRLDGNPLTQSSLPPDMYECLRVANEITVNGGGSGGGSGGGSSPYG |
| | | SDTTPCCFAYLSLALPRAHVKEYFYTSSKCSNLAVVFVTRRNRQVCANPEKKWVQE |
| | | YINYLEMSGGGSHHHHHH |
| 161 | CCL5 | SPYGSDTTPCCFAYLSLALPRAHVKEYFYTSSKCSNLAWFVTRRNRQVCANPEKK |
| | | WVQEYINYLEMSGGGSHHHHHH |
| 162 | CCL19- | GANDAEDCCLSVTQRPIPGNIVKAFRYLLNEDGCRVPAVVFTTLRGYQLCAPPDQP |
| | Lumican | WVDRIIRRLKKSSAKNKGNSTRRSPVSGGGSGGGSGGGSQYYDYDIPLFMYGQISP |
| | | NCAPECNCPHSYPTAMYCDDLKLKSVPMVPPGIKYLYLRNNQIDHIDEKAFENVTD |
| | | LQWLILDHNLLENSKIKGKVFSKLKQLKKLHINYNNLTESVGPLPKSLQDLQLTNN |
| | | KISKLGSFDGLVNLTFIYLQHNQLKEDAVSASLKGLKSLEYLDLSFNQMSKLPAGL |
| | | PTSLLTLYLDNNKISNIPDEYFKRFTGLQYLRLSHNELADSGVPGNSFNISSLLEL |
| | | DLSYNKLKSIPTVNENLENYYLEVNELEKFDVKSFCKILGPLSYSKIKHLRLDGNP |
| | | LTQSSLPPDMYECLRVANEITVNGGGSHHHHHH |
| 163 | Lumican- | QYYDYDIPLFMYGQISPNCAPECNCPHSYPTAMYCDDLKLKSVPMVPPGIKYLYLR |
| | CCL19 | NNQIPHIDEKAFENVTDLQWLILDHNLLENSKIKGKVFSKLKQLKKLHINYNNLTE |
| | | SVGPLPKSLQDLQLTNNKISKLGSFDGLVNLTFIYLQHNQLKEDAVSASLKGLKSL |
| | | EYLDLSFNQMSKLPAGLPTSLLTLYLDNNKISNIPDEYFKRFTGLQYLRLSHNELA |
| | | DSGVPGNSFNISSLLELDLSYNKLKSIPTVNENLENYYLEVNELEKFDVKSFCKIL |
| | | GPLSYSKIKHLRLDGNPLTQSSLPPDMYECLRVANEITVNGGGSGGGSGGGGANDA |
| | | EDCCLSVTQRPIPGNIVKAFRYLLNEDGCRVPAVVFTTLRGYQLCAPPDQPWVDRI |
| | | IRRLKKSSAKNKGNSTRRSPVSGGGSHHHHHH |
| 164 | CCL19 | GANDAEDCCLSVTQRPIPGNIVKAFRYLLNEDGCRVPAVVFTTLRGYQLCAPPDQP |
| | | WVDRIIRRLKKSSAKNKGNSTRRSPVSGGGSHHHHHH |
| 165 | CCL21c- | SDGGGQDCCLKYSQKKIPYSIVRGYRKQEPSLGCPIPAILFLPRKHSKPELCANPE |
| | Lumican | EGWVQNLMRRLDQPPAPGKQSPGCRKNRGTSKSGKKGKGSKGCKRTEQTQPSRGGG |
| | | GSGGGSGGGSQYYDYDIPLFMYGQISPNCAPECNCPHSYPTAMYCDDLKLKSVPMV |
| | | PPGIKYLYLRNNQIDHIDEKAFENVTDLQWLILDHNLLENSKIKGKVFSKLKQLKK |
| | | LHINYNNLTESVGPLPKSLQDLQLTNNKISKLGSFDGLVNLTFIYLQHNQLKEDAV |
| | | SASLKGLKSLEYLDLSFNQMSKLPAGLPTSLLTLYLDNNKISNIPDEYFKRFTGLQ |
| | | YLRLSHNELADSGVPGNSFNISSLLELDLSYNKLKSIPTVNENLENYYLEVNELEK |
| | | FDVKSFCKILGPLSYSKIKHLRLDGNPLTQSSLPPDMYECLRVANEITVNGGGSHH |
| | | HHHH |
| 166 | Lumican- | QYYDYDIPLFMYGQISPNCAPECNCPHSYPTAMYCDDLKLKSVPMVPPGIKYLYLR |
| | CCL21c | NNQIPHIDEKAFENVTDLQWLILDHNLLENSKIKGKVFSKLKQLKKLHINYNNLTE |
| | | SVGPLPKSLQDLQLTNNKISKLGSFDGLVNLTFIYLQHNQLKEDAVSASLKGLKSL |
| | | EYLDLSFNQMSKLPAGLPTSLLTLYLDNNKISNIPDEYFKRFTGLQYLRLSHNELA |
| | | DSGVPGNSFNISSLLELDLSYNKLKSIPTVNENLENYYLEVNELEKFDVKSFCKIL |
| | | GPLSYSKIKHLRLDGNPLTQSSLPPDMYECLRVANEITVNGGGSGGGSGGGSDGGG |
| | | QDCCLKYSQKKIPYSIVRGYRKQEPSLGCPIPAILFLPRKHSKPELCANPEEGWVQ |
| | | NLMRRLDQPPAPGKQSPGCRKNRGTSKSGKKGKGSKGCKRTEQTQPSRGGGGSHHH |
| | | HHH |
| 167 | CCL21c | SDGGGQDCCLKYSQKKIPYSIVRGYRKQEPSLGCPIPAILFLPRKHSKPELCANPE |
| | | EGWVQNLMRRLDQPPAPGKQSPGCRKNRGTSKSGKKGKGSKGCKRTEQTQPSRGGG |
| | | GSHHHHHH |
| 168 | truncated | SDGGGQDCCLKYSQKKIPYSIVRGYRKQEPSLGCPIPAILFLPRKHSKPELCANPE |
| | CCL21c- | EGWVQNLMRRLDQPPAPGKGGGSGGGSGGGSQYYDYDIPLFMYGQISPNCAPECNC |
| | Lumican | PHSYPTAMYCDDLKLKSVPMVPPGIKYLYLRNNQIDHIDEKAFENVTDLQWLILDH |
| | | NLLENSKIKGKVFSKLKQLKKLHINYNNLTESVGPLPKSLQDLQLTNNKISKLGSF |
| | | DGLVNLTFIYLQHNQLKEDAVSASLKGLKSLEYLDLSFNQMSKLPAGLPTSLLTLY |
| | | LDNNKISNIPDEYFKRFTGLQYLRLSHNELADSGVPGNSFNISSLLELDLSYNKLK |
| | | SIPTVNENLENYYLEVNELEKFDVKSFCKILGPLSYSKIKHLRLDGNPLTQSSLPP |
| | | DMYECLRVANEITVNGGGSHHHHHH |
| 169 | Lumican- | QYYDYDIPLFMYGQISPNCAPECNCPHSYPTAMYCDDLKLKSVPMVPPGIKYLYLR |
| | truncated | NNQIDHIDEKAFENVTDLQWLILDHNLLENSKIKGKVFSKLKQLKKLHINYNNLTE |
| | CCL21c | SVGPLPKSLQDLQLTNNKISKLGSFDGLVNLTFIYLQHNQLKEDAVSASLKGLKSL |
| | | EYLDLSFNQMSKLPAGLPTSLLTLYLDNNKISNIPDEYFKRFTGLQYLRLSHNELA |
| | | DSGVPGNSFNISSLLELDLSYNKLKSIPTVNENLENYYLEVNELEKFDVKSFCKIL |
| | | GPLSYSKIKHLRLDGNPLTQSSLPPDMYECLRVANEITVNGGGSGGGSGGGSSDGG |
| | | GQDCCLKYSQKKIPYSIVRGYRKQEPSLGCPIPAILFLPRKHSKPELCANPEEGWV |
| | | QNLMRRLDQPPAPGKGGGSHHHHHH |
| 170 | truncated | SDGGGQDCCLKYSQKKIPYSIVRGYRKQEPSLGCPIPAILFLPRKHSKPELCANPE |
| | CCL21c | EGWVQNLMRRLDQPPAPGKGGGSHHHHHH |
| 171 | CCL11 | HPGSIPTSCCFIMTSKKIPNTLLKSYKRITNNRCTLKAIVFKTRLGKEICADPKKK |
| | | WVQDATKHLDQKLQTPKPGGGSHHHHHH |
| 172 | CCL11- | HPGSIPTSCCFIMTSKKIPNTLLKSYKRITNNRCTLKAIVFKTRLGKEICADPKKK |
| | Lumican | WVQDATKHLDQKLQTPKPGGGSGGGSGGGSQYYDYDIPLFMYGQISPNCAPECNCP |
| | | HSYPTAMYCDDLKLKSVPMVPPGIKYLYLRNNQIDHIDEKAFENVTDLQWLILDHN |
| | | LLENSKIKGKVFSKLKQLKKLHINYNNLTESVGPLPKSLQDLQLTNNKISKLGSFD |
| | | GLVNLTFIYLQHNQLKEDAVSASLKGLKSLEYLDLSFNQMSKLPAGLPTSLLTLYL |
| | | DNNKISNIPDEYFKRFTGLQYLRLSHNELADSGVPGNSFNISSLLELDLSYNKLKS |
| | | IPTVNENLENYYLEVNELEKFDVKSFCKILGPLSYSKIKHLRLDGNPLTQSSLPPD |
| | | MYECLRVANEITVNGGGSHHHHHH |
| 173 | CLEC2- | QQKYLLAEKENLSATLQQLAKKFCQELIRQSEIKTKSTFEHKCSPCATKWRYHGDS |
| | MSA-lumican | CYGFFRRNLTWEESKQYCTEQNATLVKTASQSTLDYIAERITSVRWIGLSRQNSKK |
| | | DWMWEDSSVLRKNGINLSGNTEENMNCAYLHNGKIHPASCKERHYLICERNAGMTR |
| | | VDQLLGGGGGGGGGGGGEAHKSEIAHRYNDLGEQHFKGLVLIAFSQYLQKCSYDEH |
| | | AKLVQEVTDFAKTCVADESAANCDKSLHTLFGDKLCAIPNLRENYGELADCCTKQE |
| | | PERNECFLQHKDDNPSLPPFERPEAEAMCTSFKENPTTFMGHYLHEVARRHPYFYA |
| | | PELLYYAEQYNEI-TQCCAEADKESC-TPKLDGVKEKALVSSVRQRMKCSSMQKFG |
| | | ERAFKAWAVARLSQTFPNADFAEITKLATDLTKVNKECCHGDLLECADDRAELAKY |
| | | MCENQATISSKLQTCCDKPLLKKAHCLSEVEHDTMPADLPAIAADFVEDQEVCKNY |
| | | AEAKDVFLGTFLYEYSRRHPDYSVSLLLRLAKKYEATLEKCCAEANPPACYGTVLA |
| | | EFQPLVEEPKNLVKTNCDLYEKLGEYGFQNAILVRYTQKAPQVSTPTLVEAARNLG |
| | | RVGTKCCTLPEDQRLPCVEDYLSAILNRVCLLHEKTPVSEHVTKCCSGSLVERRPC |
| | | FSALTVDETYVPKEFKAETFTFHSDICTLPEKEKQIKKQTALAELVKHKPKATAEQ |
| | | [chemical structure] |
| 174 | CLEC2-MSA | QQKYLLAEKENLSATLQQLAKKFCQELIRQSEIKTKSTFEHKCSPCATKWRYHGDS |
| | | CYGFFRRNLTWEESKQYCTEQNATLVKTASQSTLDYIAERITSVRWIGLSRQNSKK |
| | | DWMWEDSSVLRKNGINLSGNTEENMNCAYLHNGKIHPASCKERHYLICERNAGMTR |
| | | VDQLLGGGSGGGSGGGSEAHKSEIAHRYNDLGEQHFKGLVLIAFSQYLQKCSYDEH |
| | | AKLVQEVTDFAKTCVADESAANCDKSLHTLFGDKLCAIPNLRENYGELADCCTKQE |
| | | PERNECFLQHKDDNPSLPPFERPEAEAMCTSFKENPTTFMGHYLHEVARRHPYFYA |
| | | PELLYYAEQYNEILTQCCAEADKESCLTPKLDGVKEKALVSSVRQRMKCSSMQKFG |
| | | ERAFKAWAVARLSQTFPNADFAEITKLATDLTKVNKECCHGDLLECADDRAELAKY |
| | | MCENQATISSKLQTCCDKPLLKKAHCLSEVEHDTMPADLPAIAADFVEDQEVCKNY |
| | | AEAKDVFLGTFLYEYSRRHPDYSVSLLLRLAKKYEATLEKCCAEANPPACYGTVLA |
| | | EFQPLVEEPKNLVKTNCDLYEKLGEYGFQNAILVRYTQKAPQVSTPTLVEAARNLG |
| | | RVGTKCCTLPEDQRLPCVEDYLSAILNRVCLLHEKTPVSEHVTKCCSGSLVERRPC |
| | | FSALTVDETYVPKEFKAETFTFHSDICTLPEKEKQIKKQTALAELVKHKPKATAEQ |
| | | LKTVMDDFAQFLDTCCKAADKDTCFSTEGPNLVTRCKDALAHHHHHH |
| 175 | IFNg-MSA- | HGTVIESLESLNNYFNSSGIDVEEKSLFLDIWRNWQKDGDMKILQSQIISFYLRLF |
| | lumican | EVLKDNQAISNNISVIESHLITTFFSNSKAKKDAFMSIAKFEVNNPQVQRQAFNEL |
| | | IRVVHQLLPESSLRKRKRSRCGSGGGSEAHKSEIAHRYNDLGEQHFKGLVLIAFSQ |
| | | YLQKCSYDEHAKLVQEVTDFAKTCVADESAANCDKSLHTLFGDKLCAIPNLRENYG |
| | | ELADCCTKQEPERNECFLQHKDDNPSLPPFERPEAEAMCTSFKENPTTFMGHYLHE |
| | | VARRHPYFYAPELLYYAEQYNEILTQCCAEADKESCLTPKLDGVKEKALVSSVRQR |
| | | MKCSSMQKFGERAFKAWAVARLSQTFPNADFAEITKLATDLTKVNKECCHGDLLEC |
| | | ADDRAELAKYMCENQATISSKLQTCCDKPLLKKAHCLSEVEHDTMPADLPAIAADF |
| | | VEDQEVCKNYAEAKDVFLGTFLYEYSRRHPDYSVSLLLRLAKKYEATLEKCCAEAN |
| | | PPACYGTVLAEFQPLVEEPKNLVKTNCDLYEKLGEYGFQNAILVRYTQKAPQVSTP |
| | | TLVEAARNLGRVGTKCCTLPEDQRLPCVEDYLSAILNRVCLLHEKTPVSEHVTKCC |
| | | SGSLVERRPCFSALTVDETYVPKEFKAETFTFHSDICTLPEKEKQIKKQTALAELV |
| | | KHKPKATAEQLKTVMDDFAQFLDTCCKAADKDTCFSTEGPNLVTRCKDALAGGGSG |
| | | [chemical structure] |
| 176 | IFNg-IFNg- | HGTVIESLESLNNYFNSSGIDVEEKSLFLDIWRNWQKDGDMKILQSQIISFYLRLF |
| | MSA-lumican | EVLKDNQAISNNISVIESHLITTFFSNSKAKKDAFMSIAKFEVNNPQVQRQAFNEL |
| | | IRVVHQLLPESSLRKRKRSRCGGGSGGGSGGGSGGGSHGTVIESLESLNNYFNSSG |
| | | IDVEEKSLFLDIWRNWQKDGDMKILQSQIISFYLRLFEVLKDNQAISNNISVIESH |
| | | LITTFFSNSKAKKDAFMSIAKFEVNNPQVQRQAFNELIRVVHQLLPESSLRKRKRS |
| | | RCGSGGGSEAHKSEIAHRYNDLGEQHFKGLVLIAFSQYLQKCSYDEHAKLVQEVTD |
| | | FAKTCVADESAANCDKSLHTLFGDKLCAIPNLRENYGELADCCTKQEPERNECFLQ |
| | | HKDDNPSLPPFERPEAEAMCTSFKENPTTFMGHYLHEVARRHPYFYAPELLYYAEQ |
| | | YNEILTQCCAEADKESCLTPKLDGVKEKALVSSVRQRMKCSSMQKFGERAFKAWAV |
| | | ARLSQTFPNADFAEITKLATDLTKVNKECCHGDLLECADDRAELAKYMCENQATIS |
| | | SKLQTCCDKPLLKKAHCLSEVEHDTMPADLPAIAADFVEDQEVCKNYAEAKDVFLG |
| | | TFLYEYSRRHPDYSVSLLLRLAKKYEATLEKCCAEANPPACYGTVLAEFQPLVEEP |
| | | KNLVKTNCDLYEKLGEYGFQNAILVRYTQKAPQVSTPTLVEAARNLGRVGTKCCTL |
| | | PEDQRLPCVEDYLSAILNRVCLLHEKTPVSEHVTKCCSGSLVERRPCFSALTVDET |
| | | YVPKEFKAETFTFHSDICTLPEKEKQIKKQTALAELVKHKPKATAEQLKTVMDDFA |
| | | [chemical structure] |
| 177 | IFNg-IFNg- | HGTVTESLESLNNYFNSSGIDVEEKSLFLDIWRNWQKDGDMKILQSQIISFYLRLF |
| | MSA | EVLKDNQAISNNISVIESHLITTFFSNSKAKKDAFMSIAKFEVNNPQVQRQAFNEL |
| | | IRVVHQLLPESSLRKRKRSRCGGGSGGGSGGGSGGGSHGTVIESLESLNNYFNSSG |
| | | IDVEEKSLFLDIWRNWQKDGDMKILQSQIISFYLRLFEVLKDNQAISNNISVIESH |
| | | LITTFFSNSKAKKDAFMSIAKFEVNNPQVQRQAFNELIRVVHQLLPESSLRKRKRS |
| | | RCGSGGGSEAHKSEIAHRYNDLGEQHFKGLVLIAFSQYLQKCSYDEHAKLVQEVTD |
| | | FAKTCVADESAANCDKSLHTLFGDKLCAIPNLRENYGELADCCTKQEPERNECFLQ |
| | | HKDDNPSLPPFERPEAEAMCTSFKENPTTFMGHYLHEVARRHPYFYAPELLYYAEQ |
| | | YNEILTQCCAEADKESCLTPKLDGVKEKALVSSVRQRMKCSSMQKFGERAFKAWAV |
| | | ARLSQTFPNADFAEITKLATDLTKVNKECCHGDLLECADDRAELAKYMCENQATIS |
| | | SKLQTCCDKPLLKKAHCLSEVEHDTMPADLPAIAADFVEDQEVCKNYAEAKDVFLG |
| | | TFLYEYSRRHPDYSVSLLLRLAKKYEATLEKCCAEANPPACYGTVLAEFQPLVEEP |
| | | KNLVKTNCDLYEKLGEYGFQNAILVRYTQKAPQVSTPTLVEAARNLGRVGTKCCTL |
| | | PEDQRLPCVEDYLSAILNRVCLLHEKTPVSEHVTKCCSGSLVERRPCFSALTVDET |
| | | YVPKEFKAETFTFHSDICTLPEKEKQIKKQTALAELVKHKPKATAEQLKTVMDDFA |
| | | QFLDTCCKAADKDTCFSTEGPNLVTRCKDALAHHHHHH |
| 178 | Lumican- MSA-IFNg | [chemical structure] |
| | | HRYNDLGEQHFKGLVLIAFSQYLQKCSYDEHAKLVQEVTDFAKTCVADESAANCDK |
| | | SLHTLFGDKLCAIPNLRENYGELADCCTKQEPERNECFLQHKDDNPSLPPFERPEA |
| | | EAMCTSFKENPTTFMGHYLHEVARRHPYFYAPELLYYAEQYNEILTQCCAEADKES |
| | | CLTPKLDGVKEKALVSSVRQRMKCSSMQKFGERAFKAWAVARLSQTFPNADFAEIT |
| | | KLATDLTKVNKECCHGDLLECADDRAELAKYMCENQATISSKLQTCCDKPLLKKAH |
| | | CLSEVEHDTMPADLPAIAADFVEDQEVCKNYAEAKDVFLGTFLYEYSRRHPDYSVS |
| | | LLLRLAKKYEATLEKCCAEANPPACYGTVLAEFQPLVEEPKNLVKTNCDLYEKLGE |
| | | YGFQNAILVRYTQKAPQVSTPTLVEAARNLGRVGTKCCTLPKDQRLPCVEDYLSAI |
| | | LNRVCLLHEKTPVSEHVTKCCSGSLVERRPCFSALTVDETYVPKEFKAETFTFHSD |
| | | ICTLPEKEKQIKKQTALAELVKHKPKATAEQLKTVMDDFAQFLDTCCKAADKDTCF |
| | | STEGPNLVTRCKDALAGGGSHGTVIESLESLNNYFNSSGIDVEEKSLFLDIWRNWQ |
| | | KDGDMKILQSQIISFYLRLFEVLKDNQAISNNISVIESHLITTFFSNSKAKKDAFM |
| | | SIAKFEVNNPQVQRQAFNELIRWHQLLPESSLRKRKRSRCHHHHHH |
| 179 | Lumican- MSA-IFNg- IFNg | [chemical structure] |
| | | HRYNDLGEQHFKGLVLIAFSQYLQKCSYDEHAKLVQEVTDFAKTCVADESAANCDK |
| | | SLHTLFGDKLCAIPNLRENYGELADCCTKQEPERNECFLQHKDDNPSLPPFERPEA |
| | | EAMCTSFKENPTTFMGHYLHEVARRHPYFYAPELLYYAEQYNEILTQCCAEADKES |
| | | CLTPKLDGVKEKALVSSVRQRMKCSSMQKFGERAFKAWAVARLSQTFPNADFAEIT |
| | | KLATDLTKVNKECCHGDLLECADDRAELAKYMCENQATISSKLQTCCDKPLLKKAH |
| | | CLSEVEHDTMPADLPAIAADFVEDQEVCKNYAEAKDVFLGTFLYEYSRRHPDYSVS |
| | | LLLRLAKKYEATLEKCCAEANPPACYGTVLAEFQPLVEEPKNLVKTNCDLYEKLGE |
| | | YGFQNAILVRYTQKAPQVSTPTLVEAARNLGRVGTKCCTLPEDQRLPCVEDYLSAI |
| | | LNRVCLLHEKTPVSEHVTKCCSGSLVERRPCFSALTVDETYVPKEFKAETFTFHSD |
| | | ICTLPEKEKQIKKQTALAELVKHKPKATAEQLKTVMDDFAQFLDTCCKAADKDTCF |
| | | STEGPNLVTRCKDALAGGGSHGTVIESLESLNNYFNSSGIDVEEKSLFLDIWRNWQ |
| | | KDGDMKILQSQIISFYLRLFEVLKDNQAISNNISVIESHLITTFFSNSKAKKDAFM |
| | | SIAKFEVNNPQVQRQAFNELIRVVHQLLPESSLRKRKRSRCGGGSGGGSGGGSGGG |
| | | SHGTVIESLESLNNYFNSSGIDVEEKSLFLDIWRNWQKDGDMKILQSQIISFYLRL |
| | | FEVLKDNQAISNNISVIESHLITTFFSNSKAKKDAFMSIAKFEVNNPQVQRQAFNE |
| | | LIRVVHQLLPESSLRKRKRSRCHHHHHH |
| 180 | MSA-IFNg- | EAHKSEIAHRYNDLGEQHFKGLVLIAFSQYLQKCSYDEHAKLVQEVTDFAKTCVAD |
| | IFNg | ESAANCDKSLHTLFGDKLCAIPNLRENYGELADCCTKQEPERNECFLQHKDDNPSL |
| | | PPFERPEAEAMCTSFKENPYTFMGHYLHEVARRHPYFYAPKLLYYAFQYNEILTQC |
| | | CAEADKESCLTPKLDGVKEKALVSSVRQRMKCSSMQKFGERAFKAWAVARLSQTFP |
| | | NADFAEITKLATDLTKVNKECCHGDLLECADDRAELAKYMCENQATISSKLQTCCD |
| | | KPLLKKAHCLSEVEHDTMPADLPAIAADFVEDQEVCKNYAEAKDVFLGTFLYEYSR |
| | | RHPDYSVSLLLRLAKKYEATLEKCCAEANPPACYGTVLAEFQPLVEEPKNLVKTNC |
| | | DLYEKLGEYGFQNAILVRYTQKAPQVSTPTLVEAARNLGRVGTKCCTLPEDQRLPC |
| | | VEDYLSAILNRVCLLHEKTPVSEHVTKCCSGSLVERRPCFSALTVDETYVPKEFKA |
| | | ETFTFHSDICTLPEKEKQIKKQTALAELVKHKPKATAEQLKTVMDDFAQFLDTCCK |
| | | AADKDTCFSTEGPNLVTRCKDALAGGGSHGTVIESLESLNNYFNSSGIDVEEKSLF |
| | | LDIWRNWQKDGDMKILQSQIISFYLRLFEVLKDNQAISNNISVIESHLITTFFSNS |
| | | KAKKDAFMSIAKFEVNNPQVQRQAFNELIRVVHQLLPESSLRKRKRSRCGGGSGGG |
| | | SGGGSGGGSHGTVIESLESLNNYFNSSGIDVEEKSLFLDIWRNWQKDGDMKILQSQ |
| | | IISFYLRLFEVLKDNQAISNNISVIESHLITTFFSNSKAKKDAFMSIAKFEVNNPQ |
| | | VQRQAFNELIRVVHQLLPESSLRKRKRSRCHHHHHH |
| 181 | LAIR-(H)₆ | QEGSLPDITIFPNSSLMISQGTFVTVVCSYSDKHDLYNMVRLEKDGSTFMEKSTEP |
| | | YKTEDEFEIGPVNETITGHYSCIYSKGITWSERSKTLELKVIKENVIQTPAPGPTS |
| | | DTSWLKTYSIYHHHHHH |
| 182 | Lumican | YYDYDIPLFMYGQISPNCAPECNCPHSYPTAMYCDDLKLKSVPMVPPGIKYLYLRN |
| | (murine) | NQIDHIDEKAFENVTDLQWLILDHNLLENSKIKGKVFSKLKQLKKLHINYNNLTES |
| | | VGPLPKSLQDLQLTNNKISKLGSFDGLVNLTFIYLQHNQLKEDAVSASLKGLKSLE |
| | | YLDLSFNQMSKLPAGLPTSLLTLYLDNNKISNIPDEYFKRFTGLQYLRLSHNELAD |
| | | SGVPGNSFNISSLLELDLSYNKLKSIPTVNENLENYYLEVNELEKFDVKSFCKILG |
| | | PLSYSKIKHLRLDGNPLTQSSLPPDMYECLRVANEITVN |
| 183 | murine MSA | EAHKSEIAHRYNDLGEQHFKGLVLIAFSQYLQKCSYDEHAKLVQEVTDFAKTCVAD |
| | | ESAANCDKSLHTLFGDKLCAIPNLRENYGELADCCTKQEPERNECFLQHKDDNPSL |
| | | PPFERPEAEAMCTSFKENPTTFMGHYLHEVARRHPYFYAPELLYYAEQYNEILTQC |
| | | CAEADKESCLTPKLDGVKEKALVSSVRQRMKCSSMQKFGERAFKAWAVARLSQTFP |
| | | NADFAEITKLATDLTKVNKECCHGDLLECADDRAELAKYMCENQATISSKLQTCCD |
| | | KPLLKKAHCLSEVEHDTMPADLPAIAADFVEDQEVCKNYAEAKDVFLGTFLYEYSR |
| | | RHPDYSVSLLLRLAKKYEATLEKCCAEANPPACYGTVLAEFQPLVEEPKNLVKTNC |
| | | DLYEKLGEYGFQNAILVRYTQKAPQVSTPTLVEAARNLGRVGTKCCTLPEDQRLPC |
| | | VEDYLSAILNRVCLLHEKTPVSEHVTKCCSGSLVERRPCFSALTVDETYVPKEFKA |
| | | ETFTFHSDICTLPEKEKQIKKQTALAELVKHKPKATAEQLKTVMDDFAQFLDTCCK |
| | | AADKDTCFSTEGPNLVTRCKDALA |
| 184 | 3/23 LC- | [symbol] |
| | murine kappa | DTVLTQSPALAVSPGERVTISCRASESVSTRMHWYQQRPGQPPKLLIYVASRLESG |
| | (3/23 LC bold; | VPARFSGGGSGTDFTLTIDPVEANDTATYFCQQSWNDPWTFGGGTKLELKRADAAP |
| | murine kappa | TVSIFPPSSEQLTSGGASVVGFLNNFYPKDINVKWKIDGSERQNGVLNSWTDQDSK |
| | chain | DSTYSMSSTLTLTKDEYERHNSYTCEATHKTSTSPIVKSFNRNEC |
| | underlined) | |
| 185 | 3/23 HC- | EVQLVESGGGLVQPGRSLKLSCAASGFTLSDYYMAWVRQAPKKGLEWVASINYEGS |
| | lumican (LALA- | STYYGESVKGRFTISRDNAKSTLYLQMNSLRSEDTATYYCVRHDNYFDYWGQGVLV |
| | PG) (3/23 HC | TVSSAKTTAPSVYPLAPVCGGTTGSSVTLGCLVKGYFPEPVTLTWNSGSLSSGVHT |
| | bold; mIgG2c | FPALLQSGLYTLSSSVTVTSNTWPSQTITCNVAHPASSTKVDKKIEPRVPITQNPC |
| | underline; | PPLKECPPCAAPDAAGGPSVF1FPPKIKDVLMISLSPMVTCVVVDVSEDDPDVQIS |
| | LALA-PG | WFVNNVEVHTAQTQTHREDYNSTLRVVSALPIQHQDWMSGKEFKCKVNNRALGSPI |
| | silencing | EKTISKPRGPVRAPQVYVLPPPAEEMTKKEFSLTCMITGFLPAEIAVDWTSNGRTE |
| | mutation bold | QNYKNTATVLDSDGSYFMYSKLRVQKSTWERGSLFACSVVHEGLHNHLTTKTISRS |
| | underline; Lumican dotted underline) | [chemical structure] |
| 186 | LAIR-MSA-IL2 | QEGSLPDITIFPNSSLMISQGTFVTVVCSYSDKHDLYNMVRLEKDGSTFMEKSTEP |
| | (LAIR bold;- | YKTEDEFEIGPVNETITGHYSCIYSKGITWSERSKTLELKVIKENVIQTPAPGPTS |
| | (GGGS)1 | DTSWLKTYSIYGGSEAHKSEIAHRYNDLGEQHFKGLVLIAFSQYLQKCSYDEHAKL |
| | italc; MSA | VQEVTDFAKTCVADESAANCDKSLHTLFGDKLCAIPNLRENYGELADCCTKQEPER |
| | underline; | NECFLQHKDDNPSLPPFERPEAEAMCTSFKENPTTFMGHYLHEVARRHPYFYAPEL |
| | (GGGS)1 | LYYAEQYNEILTQCCAEADKESCLTPKLDGVKEKALVSSVRQRMKCSSMQKFGERA |
| | italic; IL-2; | FKAWAVARLSQTFPNADFAEITKLATDLTKVNKECCHGDLLECADDRAELAKYMCE |
| | (H)6 dotted | NQATISSKLQTCCDKPLLKKAHCLSEVEHDTMPADLPAIAADFVEDQEVCKNYAEA |
| | underline) | KDVFLGTFLYEYSRRHPDYSVSLLLRLAKKYEATLEKCCAEANPPACYGTVLAEFQ |
| | | PLVEEPKNLVKTNCDLYEKLGEYGFQNAILVRYTQKAPQVSTPTLVEAARNLGRVG |
| | | TKCCTLPEDQRLPCVEDYLSAILNRVCLLHEKTPVSEHVTKCCSGSLVERRPCFSA |
| | | LTVDETYVPKEFKAETFTFHSDICTLPEKEKQIKKQTALAELVKHKPKATAEQLKT |
| | | VMDDFAQFLDTCCKAADKDTCFSTEGPNLVTRCKDALAGGGSAPTSSSTSSSTAEA |
| | | QQQQQQQQQQQQHLEQLLMDLQELLSRMENYRNLKLPRMLTFKFYLPKQATELKDL |
| | | QCLEDELGPLRHVLDLTQSKSFQLEDAENFISNIRVTVVKLKGSDNTFECQFDDES |
| | | ATVVDFLRRWIAFCQSIISTSPQ [chemical structure] |
| 187 | LAIR30.w.A | QEGSLPDITIFPNSSLMISQGTFVTVACSYSDKHDLYNMVRLEKGGSTFMEKSTEP |
| | | YKTEDEFEIGPVNETITGHYSCIYSKGITWSERSKTLELKVIKENVIQTPAPGPTS |
| | | DTSWLKTYSIY |
| 188 | LAIR30.w.B | QEGSLPDITIFPNSSLMISQGTFVTVVCSYSDKHDLYNMVRLEKDGSTSMEKSTEP |
| | | YKTEDEFEIGPVNETITGHYSCIYSKGITWSERSKTLELKVTKENVTQTPAPGPTS |
| | | DTSWLKTYSIY |
| 189 | LAIR30.w.C | QEGSLPDITIFPNSSLMISQGTFVTVVCSYSDKHDLYNMVRLEKDGSTFMGKSTEP |
| | | YKTEDEFEIGPVNETITGHYSCIYSKGITWSERSKTLELKVIKENVIQTPAPGPTS |
| | | DTSWLKTYSIY |
| 190 | LAIR30.w.D | QEGSLPDITIFPNSSLMISQGTFVTVVCSYSDKHDLYNMVRLAKDGSTFMEKSTEP |
| | | YKTEDEFEIGPVNETITGHYSCIYSKGITWSERSKTLELKVIKENVIQTPAPGPTS |
| | | DTSWLKTYSIY |
| 191 | LAIR30.w.E | QEGSLPDITIFPNSSLMISQGTFVTVVCSYSDKHDLYNMVRLEKDGSTFME |
| | | [symbol] |
| 192 | LAIR30.w.F | QEGSLPDITIFPNSSLMISQGTFVTVVCSYSDKHDLYNMVRLEKDGSTFMEKSTEP |
| | | YKTEDEFEIGPVNETITGHYSCIYSKGITWSERAKTLELKVIKENVIQTPAPGPTS |
| | | DTSWLKTYSIY |
| 193 | LAIR30.2.K1.B | QEGSLPDITIFPNSSLVISQGTFVTVVCSYSDKHDLYNMVRLEKDGSTFMEKSTAP |
| | | YKTEDEFEIGPVNETITGHYSCIYSKGITWSERSKTLELKVIKENVIQTPAPGPTS |
| | | DTLWLKTYSIY |
| 194 | LAIR-MSA | QEGSLPDITIFPNSSLMISQGTFVTVVCSYSDKHDLYNMVRLEKDGSTFMEKSTEP |
| | (LAIR bold; | YKTEDEFEIGPVNETITGHYSCIYSKGITWSERSKTLELKVIKENVIQTPAPGPTS |
| | (GGGS)1 | DTSWLKTYSIYGGSEAHKSEIAHRYNDLGEQHFKGLVLIAFSQYLQKCSYDEHAKL |
| | italic-IL-2- | VQEVTDFAKTCVADESAANCDKSLHTLFGDKLCAIPNLRENYGELADCCTKQEPER |
| | (H)6 dotted | NECFLQHKDDNPSLPPFERPEAEAMCTSFKENPTTFMGHYLHEVARRHPYFYAPEL |
| | underline) | LYYAEQYNEILTQCCAEADKESCLTPKLDGVKEKALVSSVRQRMKCSSMQKFGERA |
| | | FKAWAVARLSQTFPNADFAEITKLATDLTKVNKECCHGDLLECADDRAELAKYMCE |
| | | NQATISSKLQTCCDKPLLKKAHCLSEVEHDTMPADLPAIAADFVEDQEVCKNYAEA |
| | | KDVFLGTFLYEYSRRHPDYSVSLLLRLAKKYEATLEKCCAEANPPACYGTVLAEFQ |
| | | PLVEEPKNLVKTNCDLYEKLGEYGFQNAILVRYTQKAPQVSTPTLVEAARNLGRVG |
| | | TKCCTLPEDQRLPCVEDYLSAILNRVCLLHEKTPVSEHVTKCCSGSLVERRPCFSA |
| | | LTVDETYVPKEFKAETFTFHSDICTLPEKEKQIKKQTALAELVKHKPKATAEQLKT |
| | | VMDDFAQFLDTCCKAADKDTCFSTEGPNLVTRCKDALAGGGS [chemical structure] |
| 195 | 4420 HC- | DVKLDETGGGLVQPGRPMKLSCVASGFTFSDYWMNWVRQSPEKGLEWVAQIRNKPY |
| | LAIR (4420 | NYETYYSDSVKGRFTISRDDSKSSVYLQMNNLRVEDMGIYYCTGSYYGMDYWGQGT |
| | HC bold; | SVTVSATTKGPSVYPLAPGSAAQTNSMVTLGCLVKGYFPEPVTVTWNSGSLSSGVH |
| | mIgG1; | TFPAVLQSDLYTLSSSVTVPSSTWPSQTVTCNVAHPASSTKVDKKIVPRDCGCKPC |
| | (GGGGS)3 | ICTVPEVSSVFIFPPKPKDVLTITLTPKVTCVVVDISKDDPEVQFSWFVDDVEVHT |
| | italic; LAIR | AQTKPREEQINSTFRSVSELPIMHQDWLNGKEFKCRVNSAAFPAPIEKTISKTKGR |
| | underline) | PKGGGGSGGGGSGGGGSQEGSLPDITIFPNSSLMISQGTFVTVVCSYSDKHDLYNM |
| | | VRLEKDGSTFMEKSTEPYKTEDEFEIGPVNETITGHYSCIYSKGITWSERSKTLEL |
| | | KVIKENVIQTPAPGPTSDTSWLKTYSIY |
| 196 | 3/23 HC-LAIR | EVQLVESGGGLVQPGRSLKLSCAASGFTLSDYYMAWVRQAPKKGLEWVASINYEGS |
| | (3/23 HC bold; | STYYGESVKGRFTISRDNAKSTLYLQMNSLRSEDTATYYCVRHDNYFDYWGQGVLV |
| | mIgG1; | TVSSATTKGPSVYPLAPGSAAQTNSMVTLGCLVKGYFPEPVTVTWNSGSLSSGVHT |
| | (GGGGS)3 | FPAVLQSDLYTLSSSVTVPSSTWPSQTVTCNVAHPASSTKVDKKIVPRDCGCKPCI |
| | italic; LAIR | CTVPEVSSVFIFPPKPKDVLTITLTPKVTCVVVDISKDDPEVQFSWFVDDVEVHTA |
| | underline | QTKPREEQINSTFRSVSELPIMHQDWLNGKEFKCRVNSAAFPAPIEKTISKTKGRP |
| | | KGGGGSGGGGSGGGGSQEGSLPDITIFPNSSLMISQGTFVTVVCSYSDKHDLYNMV |
| | | RLEKDGSTFMEKSTEPYKTEDEFEIGPVNETITGHYSCIYSKGITWSERSKTLELK |
| | | VIKENVIQTPAPGPTSDTSWLKTYSIY |
| 197 | LOB12.3 HC- | DVQLVESGGGLVQPGRSLKLSCAASGFIFSYFDMAWVRQAPTKGLEWVASISPDGS |
| | LAIR | IPYYRDSVKGRFTVSRENAKSSLYLQMDSLRSEDTATYYCARRSYGGYSEIDYWGQ |
| | (LOB12.3 HC | GVMVTVSSATTKGPSVYPLAPGSAAQTNSMVTLGCLVKGYFPEPVTVTWNSGSLSS |
| | bold; mIgG1; | GVHTFPAVLQSDLYTLSSSVTVPSSTWPSQTVTCNVAHPASSTKVDKKIVPRDCGC |
| | (GGGGS)3 | KPCICTVPEVSSVFIFPPKPKDVLTITLTPKVTCVVVDISKDDPEVQFSWFVDDVE |
| | italic; LAIR | VHTAQTKPREEQINSTFRSVSELPIMHQDWLNGKEFKCRVNSAAFPAPIEKTISKT |
| | underline | KGRPKGGGGSGGGGSGGGGSQEGSLPDITIFPNSSLMISQGTFVTVVCSYSDKHDL |
| | | YNMVRLEKDGSTFMEKSTEPYKTEDEFEIGPVNETITGHYSCIYSKGITWSERSKT |
| | | LELKVIKENVIQTPAPGPTSDTSWLKTYSIY |
| 198 | | QVQLKESGPGLVQPSQTLSLTCTVSGFSLTGYNLHWVRQPPGKGLEWMGRMRYDGD |
| | | TYYNSVLKSRLSISRDTSKNQVFLKMNSLQTDDTAIYYCTRDGRGDSFDYWGQGVM |
| | | VTVSSATTKGPSVYPLAPGSAAQTNSMVTLGCLVKGYFPEPVTVTWNSGSLSSGVH |
| | | TFPAVLQSDLYTLSSSVTVPSSTWPSQTVTCNVAHPASSTKVDKKIVPRDCGCKPC |
| | | ICTVPEVSSVFIFPPKPKDVLTITLTPKVTCVVVDISKDDPEVQFSWFVDDVEVHT |
| | | AQTKPREEQINSTFRSVSELPIMHQDWLNGKEFKCRVNSAAFPAPIEKTISKTKGR |
| | | PKGGGGSGGGGSGGGGSQEGSLPDITIFPNSSLMISQGTFVTVVCSYSDKHDLYNM |
| | | VRLEKDGSTFMEKSTEPYKTEDEFEIGPVNETITGHYSCIYSKGITWSERSKTLEL |
| | | KVIKENVIQTPAPGPTSDTSWLKTYSIY |
| 199 | | EVQLVESGGGLVQPGKSLKLSCEASGFTFSGYGMHWVRQAPGRGLESVAYITSSSI |
| | | NIKYADAVKGRFTVSRDNAKNLLFLQMNILKSEDTAMYYCARFDWDKNYWGQGTMV |
| | | TVSSATTKGPSVYPLAPGSAAQTNSMVTLGCLVKGYFPEPVTVTWNSGSLSSGVHT |
| | | FPAVLQSDLYTLSSSVTVPSSTWPSQTVTCNVAHPASSTKVDKKIVPRDCGCKPCI |
| | | CTVPEVSSVFIFPPKPKDVLTITLTPKVTCVVVDISKDDPEVQFSWFVDDVEVHTA |
| | | QTKPREEQINSTFRSVSELPIMHQDWLNGKEFKCRVNSAAFPAPIEKTISKTKGRP |
| | | KGGGGGGGGGSGGGGGQEGSLPDITIFPNSSLMISQGTFVTVVCSYSDKHDLYNMV |
| | | RLEKDGSTFMEKSTEPYKTEDEFEIGPVNETITGHYSCIYSKGITWSERSKTLELK |
| | | VIKENVIQTPAPGPTSDTSWLKTYSIY |

[chemical structure]

[symbol]

indicates data missing or illegible when filed

The application's sequence listing, which the Patent Office published only in electronic form, follows.

SEQUENCE LISTING (212 sequences)

SEQ ID NO: 1 - protein, 133 aa, Artificial Sequence [sequence omitted]

SEQ ID NO: 2 - protein, 306 aa, Artificial Sequence
  Synthetic: Wild Type IL12B without signal (IL12B) Amino Acids
IWELKKDVYVVELDWYPDAPGEMVVLTCDTPEEDGITWTLDQSSEVLGSGKTLTIQVKEFGDAGQYTCHKGGEVLSHSLLLLHKKEDGIWSTDILKDQKEPKNKTFLRCEAKNYSGRFTCWWLTTISTDLTFSVKSSRGSSDPQGVTCGAATLSAERVRGDNKEYEYSVECQEDSACPAAEESLPIEVMVDAVHKLKYENYTSSFFIRDIIKPDPPKNLQLKPLKNSRQVEVSWEYPDTWSTPHSYFSLTFCVQVQGKSKREKKDRVFTDKTSATVICRKNASISVRAQDRYYSSSWSEWASVPCS

SEQ ID NO: 3 - protein, 197 aa, Artificial Sequence
  Synthetic: Wild Type IL12A without signal peptide Amino acids
RNLPVATPDPGMFPCLHHSQNLLRAVSNMLQKARQTLEFYPCTSEEIDHEDITKDKTSTVEACLPLELTKNESCLNSRETSFITNGSCLASRKTSFMMALCLSSIYEDLKMYQVEFKTMNAKLLMDPKRQIFLDQNMLAVIDELMQALNFNSETVPQKSSLEEPDFYKTKIKLCILLHAFRIRAVTIDRVMSYLNAS

SEQ ID NO: 4 - protein, 175 aa, Artificial Sequence
  Synthetic: IL-15Ra
ITCPPPMSVEHADIWVKSYSLYSRERYICNSGFKRKAGTSSLTECVLNKATNVAHWTTPSLKCIRDPALVHQRPAPPSTVTTAGVTPQPESLSPSGKEPAASSPSSNNTAATTAAIVPGSQLMPSKSPSTGTTEISSHESSHGTPSQTTAKNWELTASASHQPPGVYPQGHSDTT

SEQ ID NO: 5 - protein, 114 aa, Artificial Sequence
  Synthetic: IL-15
NWVNVISDLKKIEDLIQSMHIDATLYTESDVHPSCKVTAMKCFLLELQVISLESGDASIHDTVENLIILANNSLSSNGNVTESGCKECEELEEKNIKEFLQSFVHIVQMFINTS

SEQ ID NO: 6 - protein, 157 aa, Artificial Sequence [sequence omitted]

SEQ ID NO: 7 - protein, 138 aa, Artificial Sequence
  Synthetic: IFN-gamma
QDPYVKEAENLKKYFNAGHSDVADNGTLFLGILKNWKEESDRKIMQSQIVSFYFKLFKNFKDDQSIQKSVETIKEDMNVKFFNSNKKKRDDFEKLTNYSVTDLNVQRKAIHELIQVMAELSPAAKTGKRKRSQMLFRG

SEQ ID NO: 8 - protein, 165 aa, Artificial Sequence
  Synthetic: IFN-alpha
CDLPQTHSLGSRRTLMLLAQMRKISLFSCLKDRHDFGFPQEEFGNQFQKAETIPVLHEMIQQIFNLFSTKDSSAAWDETLLDKFYTELYQQLNDLEACVIQGVGVTETPLMKEDSILAVRKYFQRITLYLKEKKYSPCAWEVVRAEIMRSFSLSTNLQESLRSKE

SEQ ID NO: 9 - protein, 133 aa, Artificial Sequence [sequence omitted]

SEQ ID NO: 10 - protein, 449 aa, Artificial Sequence
  Synthetic: IL-6
LAPRRCPAQEVARGVLTSLPGDSVTLTCPGVEPEDNATVHWVLRKPAAGSHPSRWAGMGRRLLLRSVQLHDSGNYSCYRAGRPAGTVHLLVDVPPEEPQLSCFRKSPLSNVVCEWGPRSTPSLTTKAVLLVRKFQNSPAEDFQEPCQYSQESQKFSCQLAVPEGDSSFYIVSMCVASSVGSKFSKTQTFQGCGILQPDPPANITVTAVARNPRWLSVTWQDPHSWNSSFYRLRFELRYRAERSKTFTTWMVKDLQHHCVIHDAWSGLRHVVQLRAQEEFGQGEWSEWSPEAMGTPWTESRSPPAENEVSTPMQALTTNKDDDNILFRDSANATSLPVQDSSSVPLPTFLVAGGSLAFGTLLCIAIVLRFKKTWKLRALKEGKTSMHPPYSLGQLVPERPRPTPVLVPLISPPVSPSSLGSDNTSSHNRPDARDPRSPYDISNTDYFFPR

SEQ ID NO: 11 - protein, 400 aa, Artificial Sequence
  Synthetic: IL-5
DLLPDEKISLLPPVNFTIKVTGLAQVLLQWKPNPDQEQRNVNLEYQVKINAPKEDDYETRITESKCVTILHKGFSASVRTILQNDHSLLASSWASAELHAPPGSPGTSIVNLTCTTNTTEDNYSRLRSYQVSLHCTWLVGTDAPEDTQYFLYYRYGSWTEECQEYSKDTLGRNIACWFPRTFILSKGRDWLAVLVNGSSKHSAIRPFDQLFALHAIDQINPPLNVTAEIEGTRLSIQWEKPVSAFPIHCFDYEVKIHNTRNGYLQIEKLMTNAFISIIDDLSKYDVQVRAAVSSMCREAGLWSEWSQPIYVGNDEHKPLREWFVIVIMATICFILLILSLICKICHLWIKLFPPIPAPKSNIKDLFVTTNYEKAGSSETEIEVICYIEKPGVETLEDSVF

SEQ ID NO: 12 - protein, 77 aa, Artificial Sequence
  Synthetic: IL-8
AVLPRSAKELRCQCIKTYSKPFHPKFIKELRVIESGPHCANTEIIVKLSDGRELCLDPKENWVQRVVEKFLKRAENS

SEQ ID NO: 13 - protein, 152 aa, Artificial Sequence
  Synthetic: IL-7
DCDIEGKDGKQYESVLMVSIDQLLDSMKEIGSNCLNNEFNFFKRHICDANKEGMFLFRAARKLRQFLKMNSTGDFDLHLLKVSEGTTILLNCTGQVKGRKPAALGEAQPTKSLEENKSLKEQKKLNDLCFLKRLLQEIKTCWNKILMGTKEH

SEQ ID NO: 14 - protein, 132 aa, Artificial Sequence
  Synthetic: IL-17A
GITIPRNPGCPNSEDKNFPRTVMVNLNIHNRNTNTNPKRSSDYYNRSTSPWNLHRNEDPERYPSVIWEAKCRHLGCINADGNVDYHMNSVPIQQEILVLRREPPHCPNSFRLEKILVSVGCTCVTPIVHHVA

SEQ ID NO: 15 - protein, 170 aa, Artificial Sequence
  Synthetic: IL-23alpha
RAVPGGSSPAWTQCQQLSQKLCTLAWSAHPLVGHMDLREEGDEETTNDVPHIQCGDGCDPQGLRDNSQFCLQRIHQGLIFYEKLLGSDIFTGEPSLLPDSPVGQLHASLLGLSQLLQPEGHHWETQQIPSLSPSQPWQRLLLRFKILRSLQAFVAVAARVFAHGAATLSP

SEQ ID NO: 16 - protein, 157 aa, Artificial Sequence
  Synthetic: IL-18
YFGKLESKLSVIRNLNDQVLFIDQGNRPLFEDMTDSDCRDNAPRTIFIISMYKDSQPRGMAVTISVKCEKISTLSCENKIISFKEMNPPDNIKDTKSDIIFFQRSVPGHDNKMQFESSSYEGYFLACEKERDLFKLILKKEDELGDRSIMFTVQNED

SEQ ID NO: 17 - protein, 159 aa, Artificial Sequence
  Synthetic: IL-1alpha
SAPFSFLSNVKYNFMRIIKYEFILNDALNQSIIRANDQYLTAAALHNLDEAVKFDMGAYKSSKDDAKITVILRISKTQLYVTAQDEDQPVLLKEMPEIPKTITGSETNLLFFWETHGTKNYFTSVAHPNLFIATKQDYWVCLAGGPPSITDFQILENQA

SEQ ID NO: 18 - protein, 153 aa, Artificial Sequence
  Synthetic: IL-1beta
APVRSLNCTLRDSQQKSLVMSGPYELKALHLQGQDMEQQVVFSMSFVQGEESNDKIPVALGLKEKNLYLSCVLKDDKPTLQLESVDPKNYPKKKMEKRFVFNKIEINNKLEFESAQFPNWYISTSQAENMPVFLGGTKGGQDITDFTMQFVSS

SEQ ID NO: 19 - protein, 129 aa, Artificial Sequence [sequence omitted]

SEQ ID NO: 20 - protein, 133 aa, Artificial Sequence
  Synthetic: IL-3
APMTQTTPLKTSWVNCSNMIDEIITHLKQPPLPLLDFNNLNGEDQDILMENNLRRPNLEAFNRAVKSLQNASAIESILKNLLPCLPLATAAPTRHPIHIKDGDWNEFRRKLTFYLKTLENAQAQQTTLSLAIF

SEQ ID NO: 21 - protein, 160 aa, Artificial Sequence
  Synthetic: IL-10
SPGQGTQSENSCTHFPGNLPNMLRDLRDAFSRVKTFFQMKDQLDNLLLKESLLEDFKGYLGCQALSEMIQFYLEEVMPQAENQDPDIKAHVNSLGENLKTLRLRLRRCHRFLPCENKSKAVEQVKNAFNKLQEKGIYKAMSEFDIFINYIEAYMTMKIRN

SEQ ID NO: 22 - protein, 111 aa, Artificial Sequence
  Synthetic: IL-13
PVPPSTALRELIEELVNITQNQKAPLCNGSMVWSINLTAGMYCAALESLINVSGCSAIEKTQRMLSGFCPHKVSAGQFSSLHVRDTKIEVAQFVKDLLLHLKKLFREGRFN

SEQ ID NO: 23 - protein, 132 aa, Artificial Sequence; identical to SEQ ID NO: 14
  Synthetic: IL-17a

SEQ ID NO: 24 - protein, 126 aa, Artificial Sequence
  Synthetic: IL-9
QGCPTLAGILDINFLINKMQEDPASKCHCSANVTSCLCLGIPSDNCTRPCFSERLSQMTNTTMQTRYPLIFSRVKKSVEVLKNNKCPYFSCEQPCNQTTAGNALTFLKSLLEIFQKEKMRGMRGKI

SEQ ID NO: 25 - protein, 138 aa, Artificial Sequence; identical to SEQ ID NO: 7
  Synthetic: IFN-gamma

SEQ ID NO: 26 - protein, 165 aa, Artificial Sequence; identical to SEQ ID NO: 8
  Synthetic: IFN-alpha

SEQ ID NO: 27 - protein, 127 aa, Artificial Sequence [sequence omitted]

SEQ ID NO: 28 - protein, 209 aa, Artificial Sequence
  Synthetic: FLT3L
TQDCSFQHSPISSDFAVKIRELSDYLLQDYPVTVASNLQDEELCGGLWRLVLAQRWMERLKTVAGSKMQGLLERVNTEIHFVTKCAFQPPPSCLRFVQTNISRLLQETSEQLVALKPWITRQNFSRCLELQCQPDSSTLPPPWSPRPLEATAPTAPQPPLLLLLLLPVGLLLLAAAWCLHWQRTRRRTPRPGEQVPPVPSPQDLLLVEH

SEQ ID NO: 29 - protein, 178 aa, Artificial Sequence
  Synthetic: G-CSF
ATPLGPASSLPQSFLLKCLEQVRKIQGDGAALQEKLVSECATYKLCHPEELVLLGHSLGIPWAPLSSCPSQALQLAGCLSQLHSGLFLYQGLLQALEGISPELGPTLDTLQLDVADFATTIWQQMEELGMAPALQPTQGAMPAFASAFQRRAGGVLVASHLQSFLEVSYRVLRHLAQP

SEQ ID NO: 30 - protein, 180 aa, Artificial Sequence
  Synthetic: LIF
SPLPITPVNATCAIRHPCHNNLMNQIRSQLAQLNGSANALFILYYTAQGEPFPNNLDKLCGPNVTDFPPFHANGTEKAKLVELYRIVVYLGTSLGNITRDQKILNPSALSLHSKLNATADILRGLLSNVLCRLCSKYHVGHVDVTYGPDTSGKDVFQKKKLGCQLLGKYKQIIAVLAQAF

SEQ ID NO: 31 - protein, 522 aa, Artificial Sequence
  Synthetic: M-CSF
EEVSEYCSHMIGSGHLQSLQRLIDSQMETSCQITFEFVDQEQLKDPVCYLKKAFLLVQDIMEDTMRFRDNTPNAIAIVQLQELSLRLKSCFTKDYEEHDKACVRTFYETPLQLLEKVKNVFNETKNLLDKDWNIFSKNCNNSFAECSSQDVVTKPDCNCLYPKAIPSSDPASVSPHQPLAPSMAPVAGLTWEDSEGTEGSSLLPGEQPLHTVDPGSAKQRPPRSTCQSFEPPETPVVKDSTIGGSPQPRPSVGAFNPGMEDILDSAMGTNWVPEEASGEASEIPVPQGTELSPSRPGGGSMQTEPARPSNFLSASSPLPASAKGQQPADVTGTALPRVGPVRPTGQDWNHTPQKTDHPSALLRDPPEPGSPRISSLRPQGLSNPSTLSAQPQLSRSHSSGSVLPLGELEGRRSTRDRRSPAEPEGGPASEGAARPLPRFNSVPLTDTGHERQSEGSFSPQLQESVFHLLVPSVILVLLAVGGLLFYRWRRRSHQEPQRADSPLEQPEGSPLTQDDRQVELPV

SEQ ID NO: 32 - protein, 73 aa, Artificial Sequence
  Synthetic: MIP-2
APLATELRCQCLQTLQGIHLKNIQSVKVKSPGPHCAQTEVIATLKNGQKACLNPASPMVKKIIEKMLKNGKSN

SEQ ID NO: 33 - protein, 69 aa, Artificial Sequence
  Synthetic: MIP-1beta
APMGSDPPTACCFSYTARKLPRNFVVDYYETSSLCSQPAVVFQTKRSKQVCADPSESWVQEYVYDLELN

SEQ ID NO: 34 - protein, 73 aa, Artificial Sequence
  Synthetic: KP (aka CXCL1)
ASVATELRCQCLQTLQGIHPKNIQSVNVKSPGPHCAQTEVIATLKNGRKACLNPASPIVKKIIEKMLNSDKSN

SEQ ID NO: 35 - protein, 103 aa, Artificial Sequence
  Synthetic: MIG (aka CXCL9)
TPVVRKGRCSCISTNQGTIHLQSLKDLKQFAPSPSCEKIEIIATLKNGVQTCLNPDSADVKELIKKWEKQVSQKKKQKNGKKHQKKKVLKVRKSQRSRQKKTT

SEQ ID NO: 36 - protein, 77 aa, Artificial Sequence
  Synthetic: IP-10 (CXCL10)
VPLSRTVRCTCISISNQPVNPRSLEKLEIIPASQFCPRVEIIATMKKKGEKRCLNPESKAIKNLLKAVSKERSKRSP

SEQ ID NO: 37 - protein, 76 aa, Artificial Sequence
  Synthetic: MCP-1
QPDAINAPVTCCYNFTNRKISVQRLASYRRITSSKCPKEAVIFKTIVAKEICADPKQKWVQDSMDHLDKQTQTPKT

SEQ ID NO: 38 - protein, 74 aa, Artificial Sequence
  Synthetic: Eotaxin
GPASVPTTCCFNLANRKIPLQRLESYRRITSGKCPQKAVIFKTKLAKDICADPKKKWVQDSMKYLDQKSPTPKP

SEQ ID NO: 39 - protein, 68 aa, Artificial Sequence
  Synthetic: RANTES
SPYSSDTTPCCFAYIARPLPRAHIKEYFYTSGKCSNPAVVFVTRKNRQVCANPEKKWVREYINSLEMS

SEQ ID NO: 40 - protein, 78 aa, Artificial Sequence
  Synthetic: LIX
AGPAAAVLRELRCVCLQTTQGVHPKMISNLQVFAIGPQCSKVEVVASLKNGKEICLDPEAPFLKKVIQKILDGGNKEN

SEQ ID NO: 41 - protein, 69 aa, Artificial Sequence
  Synthetic: MIP-1alpha
SLAADTPTACCFSYTSRQIPQNFIADYFETSSQCSKPGVIFLTKRSRQVCADPSEEWVQKYVSDLELSA

SEQ ID NO: 42 - protein, 749 aa, Homo sapiens
  misc_feature (1)..(749): Human serum albumin (amino acid sequence)
MDMRVPAQLLGLLLLWLPGARCADAHKSEVAHRFKDLGEENFKALVLIAFAQYLQQCPFEDHVKLVNEVTEFAKTCVADESAENCDKSLHTLFGDKLCTVATLRETYGEMADCCAKQEPERNECFLQHKDDNPNLPRLVRPEVDVMCTAFHDNEETFLKKYLYEIARRHPYFYAPELLFFAKRYKAAFTECCQAADKAACLLPKLDELRDEGKASSAKQRLKCASLQKFGERAFKAWAVARLSQRFPKAEFAEVSKLVTDLTKVHTECCHGDLLECADDRADLAKYICENQDSISSKLKECCEKPLLEKSHCIAEVENDEMPADLPSLAADFVESKDVCKNYAEAKDVFLGMFLYEYARRHPDYSVVLLLRLAKTYETTLEKCCAAADPHECYAKVFDEFKPLVEEPQNLIKQNCELFEQLGEYKFQNALLVRYTKKVPQVSTPTLVEVSRNLGKVGSKCCKHPEAKRMPCAEDYLSVVLNQLCVLHEKTPVSDRVTKCCTESLVNRRPCFSALEVDETYVPKEFNAETFTFHADICTLSEKERQIKKQTALVELVKHKPKATKEQLKAVMDDFAAFVEKCCKADDKETCFAEEGKKLVAASQAALGLGGGSAPTSSSTKKTQLQLEHLLLDLQMILNGINNYKNPKLTRMLTFKFYMPKKATELKHLQCLEEELKPLEEVLNLAQSKNFHLRPRDLISNINVIVLELKGSETTFMCEYADETATIVEFLNRWITFCQSIISTLTGGGS

SEQ ID NO: 43 - protein, 726 aa, Homo sapiens
  misc_feature (1)..(726): Mature HSA (amino acid sequence)
DAHKSEVAHRFKDLGEENFKALVLIAFAQYLQQCPFEDHVKLVNEVTEFAKTCVADESAENCDKSLHTLFGDKLCTVATLRETYGEMADCCAKQEPERNECFLQHKDDNPNLPRLVRPEVDVMCTAFHDNEETFLKKYLYEIARRHPYFYAPELLFFAKRYKAAFTECCQAADKAACLLPKLDELRDEGKASSAKQRLKCASLQKFGERAFKAWAVARLSQRFPKAEFAEVSKLVTDLTKVHTECCHGDLLECADDRADLAKYICENQDSISSKLKECCEKPLLEKSHCIAEVENDEMPADLPSLAADFVESKDVCKNYAEAKDVFLGMFLYEYARRHPDYSVVLLLRLAKTYETTLEKCCAAADPHECYAKVFDEFKPLVEEPQNLIKQNCELFEQLGEYKFQNALLVRYTKKVPQVSTPTLVEVSRNLGKVGSKCCKHPEAKRMPCAEDYLSVVLNQLCVLHEKTPVSDRVTKCCTESLVNRRPCFSALEVDETYVPKEFNAETFTFHADICTLSEKERQIKKQTALVELVKHKPKATKEQLKAVMDDFAAFVEKCCKADDKETCFAEEGKKLVAASQAALGLGGGSAPTSSSTKKTQLQLEHLLLDLQMILNGINNYKNPKLTRMLTFKFYMPKKATELKHLQCLEEELKPLEEVLNLAQSKNFHLRPRDLISNINVIVLELKGSETTFMCEYADETATIVEFLNRWITFCQSIISTLTGGGS

SEQ ID NO: 44 - protein, 287 aa, Artificial Sequence
  Synthetic: PD-1
MQIPQAPWPVVWAVLQLGWRPGWFLDSPDPWNPPTFFPALLVVTEGDNATFTCSFSNTSESFVLNWYRMSPSNQTDKLAAFPEDRSQPGQDCRFRVTQLPNGRDFHMSVVRARRNDSGTYLCGAISLAPKAQIKESLRAELRVTERRAEVPTAHPSPSPRPAGQFQTLVVGVVGGLLGSLVLLVWVLAVICSRAARGTIGARRTGQPLKEDPSAVPVFSVDYGELDFQWREKTPEPPVPCVPEQTEYATIVFPSGMGTSSPARRGSADGPRSAQPLRPEDGHCSWPL

SEQ ID NO: 45 - protein, 290 aa, Artificial Sequence
  Synthetic: PD-L-1
MRIFAVFIFMTYWHLLNAFTVTVPKDLYVVEYGSNMTIECKFPVEKQLDLAALIVYWEMEDKNIIQFVHGEEDLKVQHSSYRQRARLLKDQLSLGNAALQITDVKLQDAGVYRCMISYGGADYKRITVKVNAPYNKINQRILVVDPVTSEHELTCQAEGYPKAEVIWTSSDHQVLSGKTTTTNSKREEKLFNVTSTLRINTTTNEIFYCTFRRLDPEENHTAELVIPELPLAHPPNERTHLVILGAILLCLGVALTFIFRLRKGRMMDVKKCGIQDTNSKKQSDTHLEET

SEQ ID NO: 46 - protein, 223 aa, Artificial Sequence
  Synthetic: CTLA-4
MACLGFQRHKAQLNLATRTWPCTLLFFLLFIPVFCKAMHVAQPAVVLASSRGIASFVCEYASPGKATEVRVTVLRQADSQVTEVCAATYMMGNELTFLDDSICTGTSSGNQVNLTIQGLRAMDTGLYICKVELMYPPPYYLGIGNGTQIYVIDPEPCPDSDFLLWILAAVSSGLFFYSFLLTAVSLSKMLKKRSPLTTGVYVKMPPTEPECEKQFQPYFIPIN

SEQ ID NO: 47 - protein, 525 aa, Artificial Sequence
  Synthetic: LAG3
MWEAQFLGLLFLQPLWVAPVKPLQPGAEVPVVWAQEGAPAQLPCSPTIPLQDLSLLRRAGVTWQHQPDSGPPAAAPGHPLAPGPHPAAPSSWGPRPRRYTVLSVGPGGLRSGRLPLQPRVQLDERGRQRGDFSLWLRPARRADAGEYRAAVHLRDRALSCRLRLRLGQASMTASPPGSLRASDWVILNCSFSRPDRPASVHWFRNRGQGRVPVRESPHHHLAESFLFLPQVSPMDSGPWGCILTYRDGFNVSIMYNLTVLGLEPPTPLTVYAGAGSRVGLPCRLPAGVGTRSFLTAKWTPPGGGPDLLVTGDNGDFTLRLEDVSQAQAGTYTCHIHLQEQQLNATVTLAIITVTPKSFGSPGSLGKLLCEVTPVSGQERFVWSSLDTPSQRSFSGPWLEAQEAQLLSQPWQCQLYQGERLLGAAVYFTELSSPGAQRSGRAPGALPAGHLLLFLILGVLSLLLLVTGAFGFHLWRRQWRPRRFSALEQGIHPPQAQSKIEELEQEPEPEPEPEPEPEPEPEPEQL

SEQ ID NO: 48 - protein, 300 aa, Artificial Sequence
  Synthetic: TIM3
MFSHLPFDCVLLLLLLLLTRSSEVEYRAEVGQNAYLPCFYTPAAPGNLVPVCWGKGACPVFECGNVVLRTDERDVNYWTSRYWLNGDFRKGDVSLTIENVTLADSGIYCCRIQIPGIMNDEKFNLKLVIKPAKVTPAPTRQRDFTAAFPRMLTTRGHGPAETQTLGSLPDINLTQISTLANELRDSRLANDLRDSGATIRGIYIGAGICAGLALALIFGALIFKWYSHSKEKIQNLSLISLANLPPSGLANAVAEGIRSEENIYTIEENVYEVEEPNEYYCYVSSRQQPSQPLGCRFAMP

SEQ ID NO: 49 - protein, 532 aa, Artificial Sequence
  Synthetic: B7-H3
MLRRRGSPGMGVHVGAALGALWFCLTGALEVQVPEDPVVALVGTDATLCCSFSPEPGFSLQLNLIWQLTDTKQLVHSFAEGQDQGSAYANRTALFPDLLAQGNASLRLQRVRVADEGSFCFVSIRDFGSAAVSLQVAAPYSKPSMTLEPNKDLRPGDTVTITCSSYQGYPEAEVFWQDGQGVPLTGNVTTSQMANEQGLFDVHSILRVVLGANGTYSCLVRNPVLQQDAHSSVTITPQRSPTGAVEVQVPEDPVVALVGTDATLRCSFSPEPGFSLAQLNLIWQLTDTKQLVHSFTEGRDQGSAYANRTALFPDLLAQGNASLRLQRVRVADEGSFTCFVSIRDFGSAAVSLQVAAPYSKPSMTLEPNKDLRPGDTVTITCSSYRGYPEAEVFWQDGQGVPLTGNVTTSQMANEQGLFDVHSVLRVVLGANGTYSCLVRNPVLQQDAHGSVTITGQPMTFPPEALWVTVGLSVCLIALLVALAFVCWRKIKQSCEEENAGAEDQDGEGEGSKTALQPLKHSDSKEDDGQEIA

SEQ ID NO: 50 - protein, 166 aa, Artificial Sequence
  Synthetic: B7-H4
MASLGQILFWSIISIIIILAGAIALIIGFGISAFSMPEVNVDYNASSETLRCEAPRWFPQPTVVWASQVDQGANFSEVSNTSFELNSENVTMKVVSVLYNVTINNTYSCMIENDIAKATGDIKVTESEIKRRSHLQLLNSKASLCVSSFFAISWALLPLSPYLMLK

SEQ ID NO: 51 - protein, 177 aa, Artificial Sequence
  Synthetic: TNF-alpha extracellular domain
GPQREEFPRDLSLISPLAQAVRSSSRTPSDKPVAHVVANPQAEGQLQWLNRRANALLANGVELRDNQLVVPSEGLYLIYSQVLFKGQGCPSTHVLLTHTISRIAVSYQTKVNLLSAIKSPCQRETPEGAEAKPWYEPIYLGGVFQLEKGDRLSAEINRPDYLDFAESGQVYFGIIAL

SEQ ID NO: 52 - protein, 182 aa, Artificial Sequence
  Synthetic: LIGHT extracellular domain
LQLHWRLGEMVTRLPDGPAGSWEQLIQERRSHEVNPAAHLTGANSSLTGSGGPLLWETQLGLAFLRGLSYHDGALVVTKAGYYYIYSKVQLGGVGCPLGLASTITHGLYKRTPRYPEELELLVSQQSPCGRATSSSRVWWDSSFLGGVVHLEAGEKVVVRVLDERLVRLRDGTRSYFGAFMV

SEQ ID NO: 53 - protein, 171 aa, Artificial Sequence
  Synthetic: LT-alpha extracellular domain
LPGVGLTPSAAQTARQHPKMHLAHSTLKPAAHLIGDPSKQNSLLWRANTDRAFLQDGFSLSNNSLLVPTSGIYFVYSQVVFSGKAYSPKATSSPLYLAHEVQLFSSQYPFHVPLLSSQKMVYPGLQEPWLHSMYHGAAFQLTQGDQLSTHTDGIPHLVLSPSTVFFGAFAL

SEQ ID NO: 54 - protein, 196 aa, Artificial Sequence
  Synthetic: LT-beta extracellular domain
QDQGGLVTETADPGAQAQQGLGFQKLPEEEPETDLSPGLPAAHLIGAPLKGQGLGWETTKEQAFLTSGTQFSDAEGLALPQDGLYYLYCLVGYRGRAPPGGGDPQGRSVTLRSSLYRAGGAYGPGTPELLLEGAETVTPVLDPARRQGYGPLWYTSVGFGGLVQLRRGERVYVNISHPDMVDFARGKTFFGAVMVG

SEQ ID NO: 55 - protein, 127 aa, Artificial Sequence
  Synthetic: BTLA extracellular domain
KESCDVQLYIKRQSEHSILAGDPFELECPVKYCANRPHVTWCKLNGTTCVKLEDRQTSWKEEKNISFFILHFEPVLPNDNGSYRCSANFQSNLIESHSTTLYVTDVKSASERPSKDEMASRPWLLYR

SEQ ID NO: 56 - protein, 133 aa, Artificial Sequence
  Synthetic: CD160 extracellular domain
INITSSASQEGTRLNLICTVWHKKEEAEGFVVFLCKDRSGDCSPETSLKQLRLKRDPGIDGVGEISSQLMFTISQVTPLHSGTYQCCARSQKSGIRLQGHFFSILFTETGNYTVTGLKQRQHLEFSHNEGTLS

SEQ ID NO: 57 - protein, 149 aa, Artificial Sequence
  Synthetic: CD40L extracellular domain
MQKGDQNPQIAAHVISEASSKTTSVLQWAEKGYYTMSNNLVTLENGKQLTVKRQGLYYIYAQVTFCSNREASSQAPFIASLCLKSPGRFERILLRAANTHSSAKPCGQQSIHLGGVFELQPGASVFVNVTDPSQVSHGTGFTSFGLLKL

SEQ ID NO: 58 - protein, 152 aa, Artificial Sequence
  Synthetic: FasL extracellular domain
QIGHPSPPPEKKELRKVAHLTGKSNSRSMPLEWEDTYGIVLLSGVKYKKGGLVINETGLYFVYSKVYFRGQSCNNLPLSHKVYMRNSKYPQDLVMMEGKMMSYCTTGQMWARSSYLGAVFNLTSADHLYVNVSELSLVNFEESQTFFGLYKL

SEQ ID NO: 59 - protein, 577 aa, Artificial Sequence
  Synthetic: CD30L extracellular domain
FPQDRPFEDTCHGNPSHYYDKAVRRCCYRCPMGLFPTQQCPQRPTDCRKQCEPDYYLDEADRCTACVTCSRDDLVEKTPCAWNSSRVCECRPGMFCSTSAVNSCARCFFHSVCPAGMIVKFPGTAQKNTVCEPASPGVSPACASPENCKEPSSGTIPQAKPTPVSPATSSASTMPVRGGTRLAQEAASKLTRAPDSPSSVGRPSSDPGLSPTQPCPEGSGDCRKQCEPDYYLDEAGRCTACVSCSRDDLVEKTPCAWNSSRTCECRPGMICATSATNSCARCVPYPICAAETVTKPQDMAEKDTTFEAPPLGTQPDCNPTPENGEAPASTSPTQSLLVDSQASKTLPIPTSAPVALSSTGKPVLDAGPVLFWVILVLVVVVGSSAFLLCHRRACRKRIRQKLHLCYPVQTSQPKLELVDSRPRRSSTQLRSGASVTEPVAEERGLMSQPLMETCHSVGAAYLESLPLQDASPAGGPSSPRDLPEPRVSTEHTNNKIEKIYIMKADTVIVGTVKAELPEGRGLAGPAEPELEEELEADHTPHYPEQETEPPLGSCSDVMLSVEEEGKEDPLPTAASGK

SEQ ID NO: 60 - protein, 205 aa, Artificial Sequence
  Synthetic: 4-1BBL extracellular domain
ACPWAVSGARASPGSAASPRLREGPELSPDDPAGLLDLRQGMFAQLVAQNVLLIDGPLSWYSDPGLAGVSLTGGLSYKEDTKELVVAKAGVYYVFFQLELRRVVAGEGSGSVSLALHLQPLRSAAGAAALALTVDLPPASSEARNSAFGFQGRLLHLSAGQRLGVHLHTEARARHAWQLTQGATVLGLFRVTPEIPAGLPSPRSE

SEQ ID NO: 61 - protein, 172 aa, Artificial Sequence
  Synthetic: CD27L extracellular domain
ATPAPKSCPERHYWAQGKLCCQMCEPGTFLVKDCDQHRKAAQCDPCIPGVSFSPDHHTRPHCESCRHCNSGLLVRNCTITANAECACRNGWQCRDKECTECDPLPNPSLTARSSQALSPHPQPTHLPYVSEMLEARTAGHMQTLADFRQLPARTLSTHWPPQRSLCSSDFIR

SEQ ID NO: 62 - protein, 186 aa, Artificial Sequence [sequence omitted]

SEQ ID NO: 63 - protein, 156 aa, Artificial Sequence
  Synthetic: TWEAK extracellular domain
SAPKGRKTRARRAIAAHYEVHPRPGQDGAQAGVDGTVSGWEEARINSSSPLRYNRQIGEFIVTRAGLYYLYCQVHFDEGKAVYLKLDLLVDGVLALRCLEEFSATAASSLGPQLRLCQVSGLLALRPGSSLRIRTLPWAHLKAAPFLTYFGLFQVH

SEQ ID NO: 64 - protein, 146 aa, Artificial Sequence
  Synthetic: APRIL extracellular domain
AVLTQKQKKQHSVLHLVPINATSKDDSDVTEVMWQPALRRGRGLQAQGYGVRIQDAGVYLLYSQVLFQDVTFTMGQVVSREGQGRQETLFRCIRSMPSHPDRAYNSCYSAGVFHLHQGDILSVIIPRARAKLNLSPHGTFLGFVKL

SEQ ID NO: 65 - protein, 152 aa, Artificial Sequence [sequence omitted]

SEQ ID NO: 66 - protein, 249 aa, Artificial Sequence
  Synthetic: RANKL extracellular domain
YFRAQMDPNRISEDGTHCIYRILRLHENADFQDTTLESQDTKLIPDSCRRIKQAFQGAVQKELQHIVGSQHIRAEKAMVDGSWLDLAKRSKLEAQPFAHLTINATDIPSGSHKVSLSSWYHDRGWAKISNMTFSNGKLIVNQDGFYYLYANICFRHHETSGDLATEYLQLMVYVTKTSIKIPSSHTLMKGGSTKYWSGNSEFHFYSINVGGFFKLRSGEEISIEVSNPSLLDPDQDATYFGAFKVRDID

SEQ ID NO: 67 - protein, 243 aa, Artificial Sequence
  Synthetic: TRAIL extracellular domain
TNELKQMQDKYSKSGIACFLKEDDSYWDPNDEESMNSPCWQVKWQLRQLVRKMILRTSEETISTVQEKQQNISPLVRERGPQRVAAHITGTRGRSNTLSSPNSKNEKALGRKINSWESSRSGHSFLSNLHLRNGELVIHEKGFYYIYSQTYFRFQEEIKENTKNDKQMVQYIYKYTSYPDPILLMKSARNSCWSKDAEYGLYSIYQGGIFELKENDRIFVSVTNEHLIDMDHEASFFGAFLVG

SEQ ID NO: 68 - protein, 329 aa, Artificial Sequence
  Synthetic: EDA1 extracellular domain
ELRSELRRERGAESRLGGSGTPGTSGTLSSLGGLDPDSPITSHLGQPSPKQQPLEPGEAALHSDSQDGHQMALLNFFFPDEKPYSEEESRRVRRNKRSKSNEGADGPVKNKKKGKKAGPPGPNGPPGPPGPPGPQGPPGIPGIPGIPGTTVMGPPGPPGPPGPQGPPGLQGPSGAADKAGTRENQPAVVHLQGQGSAIQVKNDLSGGVLNDWSRITMNPKVFKLHPRSGELEVLVDGTYFIYSQVEVYYINFTDFASYEVVVDEKPFLQCTRSIETGKTNYNTCYTAGVCLLKARQKIAVKMVHADISINMSKHTTFFGAIRLGEAPAS

SEQ ID NO: 69 - protein, 73 aa, Artificial Sequence
  Synthetic: EDA2 extracellular domain
ELRSELRRERGAESRLGGSGTPGTSGTLSSLGGLDPDSPITSHLGQPSPKQQPLEPGEAALHSDSQDGHQGHQ

SEQ ID NO: 70 - protein, 128 aa, Artificial Sequence
  Synthetic: GITRL extracellular domain
QLETAKEPCMAKFGPLPSKWQMASSEPPCVNKVSDWKLEILQNGLYLIYGQVAPNANYNDVAPFEVRLYKNKDMIQTLTNKSKIQNVGGTYELHVGDTIDLIFNSEHQVLKNNTYWGIILLANPQFIS

SEQ ID NO: 71 - protein, 208 aa, Artificial Sequence [sequence omitted]

SEQ ID NO: 72 - protein, 224 aa, Artificial Sequence
  Synthetic: CD86 (B7-2) extracellular domain
APLKIQAYFNETADLPCQFANSQNQSLSELVVFWQDQENLVLNEVYLGKEKFDSVHSKYMGRTSFDSDSWTLRLHNLQIKDKGLYQCIIHHKKPTGMIRIHQMNSELSVLANFSQPEIVPISNITENVYINLTCSSIHGYPEPKKMSVLLRTKNSTIEYDGVMQKSQDNVTELYDVSISLSVSFPDVTSNMTIFCILETDKTRLLSSPFSIELEDPQPPPDHIP

SEQ ID NO: 73 - protein, 238 aa, Artificial Sequence [sequence omitted]

SEQ ID NO: 74 - protein, 284 aa, Artificial Sequence
  Synthetic: MICA extracellular domain
EPHSLRYNLTVLSWDGSVQSGFLTEVHLDGQPFLRCDRQKCRAKPQGQWAEDVLGNKTWDRETRDLTGNGKDLRMTLAHIKDQKEGLHSLQEIRVCEIHEDNSTRSSQHFYYDGELFLSQNLETKEWTMPQSSRAQTLAMNVRNFLKEDAMKTKTHYHAMHADCLQELRRYLKSGVVLRRTVPPMVNVTRSEASEGNITVTCRASGFYPWNITLSWRQDGVSLSHDTQQWGDVLPDGNGTYQTWVATRICQGEEQRFTCYMEHSGNHSTHPVPSGKVLVLQSHW

SEQ ID NO: 75 - protein, 287 aa, Artificial Sequence
  Synthetic: MICB extracellular domain
AEPHSLRYNLMVLSQDESVQSGFLAEGHLDGQPFLRYDRQKRRAKPQGQWAEDVLGAKTWDTETEDLTENGQDLRRTLTHIKDQKGGLHSLQEIRVCEIHEDSSTRGSRHFYYDGELFLSQNLETQESTVPQSSRAQTLAMNVTNFWKEDAMKTKTHYRAMQADCLQKLQRYLKSGVAIRRTVPPMVNVTCSEVSEGNITVTCRASSFYPRNITLTWRQDGVSLSHNTQQWGDVLPDGNGTYQTWVATRIRQGEEQRFTCYMEHSGNHGTHPVPSGKVLVLQSQRTD

SEQ ID NO: 76 - protein, 191 aa, Artificial Sequence
  Synthetic: ULBP1 extracellular domain
GWVDTHCLCYDFIITPKSRPEPQWCEVQGLVDERPFLHYDCVNHKAKAFASLGKKVNVTKTWEEQTETLRDVVDFLKGQLLDIQVENLIPIEPLTLQARMSCEHEAHGHGRGSWQFLFNGQKFLLFDSNNRKWTALHPGAKKMTEKWEKNRDVTMFFQKISLGDCKMWLEEFLMYWEQMLDPTKPPSLAPG

SEQ ID NO: 77 - protein, 191 aa, Artificial Sequence
  Synthetic: ULBP2 extracellular domain
GRADPHSLCYDITVIPKFRPGPRWCAVQGQVDEKTFLHYDCGNKTVTPVSPLGKKLNVTTAWKAQNPVLREVVDILTEQLRDIQLENYTPKEPLTLQARMSCEQKAEGHSSGSWQFSFDGQIFLLFDSEKRMWTTVHPGARKMKEKWENDKVVAMSFHYFSMGDCIGWLEDFLMGMDSTLEPSAGAPLAMS

SEQ ID NO: 78 - protein, 188 aa, Artificial Sequence
  Synthetic: ULBP3 extracellular domain
DAHSLWYNFTIIHLPRHGQQWCEVQSQVDQKNFLSYDCGSDKVLSMGHLEEQLYATDAWGKQLEMLREVGQRLRLELADTELEDFTPSGPLTLQVRMSCECEADGYIRGSWQFSFDGRKFLLFDSNNRKWTVVHAGARRMKEKWEKDSGLTTFFKMVSMRDCKSWLRDFLMHRKKRLEPTAPPTMAPG

SEQ ID NO: 79 - protein, 195 aa, Artificial Sequence
  Synthetic: ULBP4 extracellular domain
HSLCFNFTIKSLSRPGQPWCEAQVFLNKNLFLQYNSDNNMVKPLGLLGKKVYATSTWGELTQTLGEVGRDLRMLLCDIKPQIKTSDPSTLQVEMFCQREAERCTGASWQFATNGEKSLLFDAMNMTWTVINHEASKIKETWKKDRGLEKYFRKLSKGDCDHWLREFLGHWEAMPEPTVSPVNASDIHWSSSSLPD

SEQ ID NO: 80 - protein, 193 aa, Artificial Sequence
  Synthetic: ULBP5, isoform 1 extracellular domain
GLADPHSLCYDITVIPKFRPGPRWCAVQGQVDEKTFLHYDCGSKTVTPVSPLGKKLNVTTAWKAQNPVLREVVDILTEQLLDIQLENYIPKEPLTLQARMSCEQKAEGHGSGSWQLSFDGQIFLLFDSENRMWTTVHPGARKMKEKWENDKDMTMSFHYISMGDCTGWLEDFLMGMDSTLEPSAGAPPTMSSG

SEQ ID NO: 81 - protein, 188 aa, Artificial Sequence
  Synthetic: ULBP5, isoform 2 extracellular domain
GLADPHSLCYDITVIPKFRPGPRWCAVQGQVDEKTFLHYDCGSKTVTPVSPLGKKLNVTTAWKAQNPVLREVVDILTEQLLDIQLENYIPKEPLTLQARMSCEQKAEGHGSGSWQLSFDGQIFLLFDSENRMWTTVHPGARKMKEKWENDKDMTMSFHYISMGDCTGWLEDFLMGMDSTLEPSAGGTV

SEQ ID NO: 82 - protein, 193 aa, Artificial Sequence
  Synthetic: ULBP6 extracellular domain
RRDDPHSLCYDITVIPKFRPGPRWCAVQGQVDEKTFLHYDCGNKTVTPVSPLGKKLNVTMAWKAQNPVLREVVDILTEQLLDIQLENYTPKEPLTLQARMSCEQKAEGHSSGSWQFSIDGQTFLLFDSEKRMWTTVHPGARKMKEKWENDKDVAMSFHYISMGDCIGWLEDFLMGMDSTLEPSAGAPLAMSSG

SEQ ID NO: 83 - protein, 217 aa, Artificial Sequence
  Synthetic: SLAMF1 extracellular domain
ASYGTGGRMMNCPKILRQLGSKVLLPLTYERINKSMNKSIHIVVTMAKSLENSVENKIVSLDPSEAGPPRYLGDRYKFYLENLTLGIRESRKEDEGWYLMTLEKNVSVQRFCLQLRLYEQVSTPEIKVLNKTQENGTCTLILGCTVEKGDHVAYSWSEKAGTHPLNPANSSHLLSLTLGPQHADNIYICTVSNPISNNSQTFSPWPGCRTDPSETKP

SEQ ID NO: 84 - protein, 194 aa, Artificial Sequence
  Synthetic: SLAMF2 extracellular domain
QGHLVHMTVVSGSNVTLNISESLPENYKQLTWFYTFDQKIVEWDSRKSKYFESKFKGRVRLDPQSGALYISKVQKEDNSTYIMRVLKKTGNEQEWKIKLQVLDPVPKPVIKIEKIEDMDDNCYLKLSCVIPGESVNYTWYGDKRPFPKELQNSVLETTLMPHNYSRCYTCQVSNSVSSKNGTVCLSPPCTLARS

SEQ ID NO: 85 - protein, 407 aa, Artificial Sequence
  Synthetic: SLAMF3 extracellular domain
KDSAPTVVSGILGGSVTLPLNISVDTEIENVIWIGPKNALAFARPKENVTIMVKSYLGRLDITKWSYSLCISNLTLNDAGSYKAQINQRNFEVTTEEEFTLFVYEQLQEPQVTMKSVKVSENFSCNITLMCSVKGAEKSVLYSWTPREPHASESNGGSILTVSRTPCDPDLPYICTAQNPVSQRSSLPVHVGQFCTDPGASRGGTTGETVVGVLGEPVTLPLALPACRDTEKVVWLFNTSIISKEREEAATADPLIKSRDPYKNRVWVSSQDCSLKISQLKIEDAGPYHAYVCSEASSVTSMTHVTLLIYRRLRKPKITWSLRHSEDGICRISLTCSVEDGGNTVMYTWTPLQKEAVVSQGESHLNVSWRSSENHPNLTCTASNPVSRSSHQFLSENICSGPERNTK

SEQ ID NO: 86 - protein, 208 aa, Artificial Sequence
  Synthetic: SLAMF4 extracellular domain
CQGSADHVVSISGVPLQLQPNSIQTKVDSIAWKKLLPSQNGFHHILKWENGSLPSNTSNDRFSFIVKNLSLLIKAAQQQDSGLYCLEVTSISGKVQTATFQVFVFESLLPDKVEKPRLQGQGKILDRGRCQVALSCLVSRDGNVSYAWYRGSKLIQTAGNLTYLDEEVDINGTHTYTCNVSNPVSWESHTLNLTQDCQNAHQEFRFWP

SEQ ID NO: 87 - protein, 204 aa, Artificial Sequence
  Synthetic: SLAMF5 extracellular domain
KDSEIFTVNGILGESVTFPVNIQEPRQVKIIAWTSKTSVAYVTPGDSETAPVVTVTHRNYYERIHALGPNYNLVISDLRMEDAGDYKADINTQADPYTTTKRYNLQIYRRLGKPKITQSLMASVNSTCNVTLTCSVEKEEKNVTYNWSPLGEEGNVLQIFQTPEDQELTYTCTAQNPVSNNSDSISARQLCADIAMGFRTHHTG

SEQ ID NO: 88 - protein, 205 aa, Artificial Sequence
  Synthetic: SLAMF6 extracellular domain
QSSLTPLMVNGILGESVTLPLEFPAGEKVNFITWLFNETSLAFIVPHETKSPEIHVTNPKQGKRLNFTQSYSLQLSNLKMEDTGSYRAQISTKTSAKLSSYTLRILRQLRNIQVTNHSQLFQNMTCELHLTCSVEDADDNVSFRWEALGNTLSSQPNLTVSWDPRISSEQDYTCIAENAVSNLSFSVSAQKLCEDVKIQYTDTKM

SEQ ID NO: 89 - protein, 204 aa, Artificial Sequence
  Synthetic: SLAMF7 extracellular domain
SGPVKELVGSVGGAVTFPLKSKVKQVDSIVWTFNTTPLVTIQPEGGTIIVTQNRNRERVDFPDGGYSLKLSKLKKNDSGIYYVGIYSSSLQQPSTQEYVLHVYEHLSKPKVTMGLQSNKNGTCVTNLTCCMEHGEEDVIYTWKALGQAANESHNGSILPISWRWGESDMTFICVARNPVSRNFSSPILARKLCEGAADDPDSSM

SEQ ID NO: 90 - protein, 1464 aa, Homo sapiens
  misc_feature (1)..(1464): human alpha1 chain precursor of type I collagen
MFSFVDLRLLLLLAATALLTHGQEEGQVEGQDEDIPPITCVQNGLRYHDRDVWKPEPCRICVCDNGKVLCDDVICDETKNCPGAEVPEGECCPVCPDGSESPTDQETTGVEGPKGDTGPRGPRGPAGPPGRDGIPGQPGLPGPPGPPGPPGPPGLGGNFAPQLSYGYDEKSTGGISVPGPMGPSGPRGLPGPPGAPGPQGFQGPPGEPGEPGASGPMGPRGPPGPPGKNGDDGEAGKPGRPGERGPPGPQGARGLPGTAGLPGMKGHRGFSGLDGAKGDAGPAGPKGEPGSPGENGAPGQMGPRGLPGERGRPGAPGPAGARGNDGATGAAGPPGPTGPAGPPGFPGAVGAKGEAGPQGPRGSEGPQGVRGEPGPPGPAGAAGPAGNPGADGQPGAKGANGAPGIAGAPGFPGARGPSGPQGPGGPPGPKGNSGEPGAPGSKGDTGAKGEPGPVGVQGPPGPAGEEGKRGARGEPGPTGLPGPPGERGGPGSRGFPGADGVAGPKGPAGERGSPGPAGPKGSPGEAGRPGEAGLPGAKGLTGSPGSPGPDGKTGPPGPAGQDGRPGPPGPPGARGQAGVMGFPGPKGAAGEPGKAGERGVPGPPGAVGPAGKDGEAGAQGPPGPAGPAGERGEQGPAGSPGFQGLPGPAGPPGEAGKPGEQGVPGDLGAPGPSGARGERGFPGERGVQGPPGPAGPRGANGAPGNDGAKGDAGAPGAPGSQGAPGLQGMPGERGAAGLPGPKGDRGDAGPKGADGSPGKDGVRGLTGPIGPPGPAGAPGDKGESGPSGPAGPTGARGAPGDRGEPGPPGPAGFAGPPGADGQPGAKGEPGDAGAKGDAGPPGPAGPAGPPGPIGNVGAPGAKGARGSAGPPGATGFPGAAGRVGPPGPSGNAGPPGPPGPAGKEGGKGPRGETGPAGRPGEVGPPGPPGPAGEKGSPGADGPAGAPGTPGPQGIAGQRGVVGLPGQRGERGFPGLPGPSGEPGKQGPSGASGERGPPGPMGPPGLAGPPGESGREGAPGAEGSPGRDGSPGAKGDRGETGPAGPPGAPGAPGAPGPVGPAGKSGDRGETGPAGPAGPVGPVGARGPAGPQGPRGDKGETGEQGDRGIKGHRGFSGLQGPPGPPGSPGEQGPSGASGPAGPRGPPGSAGAPGKDGLNGLPGPIGPPGPRGRTGDAGPVGPPGPPGPPGPPGPPSAGFDFSFLPQPPQEKAHDGGRYYRADDANVVRDRDLEVDTTLKSLSQQIENIRSPEGSRKNPARTCRDLKMCHSDWKSGEYWIDPNQGCNLDAIKVFCNMETGETCVYPTQPSVAQKNWYISKNPKDKRHVWFGESMTDGFQFEYGGQGSDPADVAIQLTFLRLMSTEASQNITYHCKNSVAYMDQQTGNLKKALLLQGSNEIEIRAEGNSRFTYSVTVDGCTSHTGAWGKTVIEYKTTKTSRLPIIDVAPLDVGAPDQEFGFDVGPVCFL

SEQ ID NO: 91 - protein, 1366 aa, Homo sapiens
  misc_feature (1)..(1366): human alpha2 chain precursor of type I collagen
MLSFVDTRTLLLLAVTLCLATCQSLQEETVRKGPAGDRGPRGERGPPGPPGRDGEDGPTGPPGPPGPPGPPGLGGNFAAQYDGKGVGLGPGPMGLMGPRGPPGAAGAPGPQGFQGPAGEPGEPGQTGPAGARGPAGPPGKAGEDGHPGKPGRPGERGVVGPQGARGFPGTPGLPGFKGIRGHNGLDGLKGQPGAPGVKGEPGAPGENGTPGQTGARGLPGERGRVGAPGPAGARGSDGSVGPVGPAGPIGSAGPPGFPGAPGPKGEIGAVGNAGPAGPAGPRGEVGLPGLSGPVGPPGNPGANGLTGAKGAAGLPGVAGAPGLPGPRGIPGPVGAAGATGARGLVGEPGPAGSKGESGNKGEPGSAGPQGPPGPSGEEGKRGPNGEAGSAGPPGPPGLRGSPGSRGLPGADGRAGVMGPPGSRGASGPAGVRGPNGDAGRPGEPGLMGPRGLPGSPGNIGPAGKEGPVGLPGIDGRPGPIGPAGARGEPGNIGFPGPKGPTGDPGKNGDKGHAGLAGARGAPGPDGNNGAQGPPGPQGVQGGKGEQGPPGPPGFQGLPGPSGPAGEVGKPGERGLHGEFGLPGPAGPRGERGPPGESGAAGPTGPIGSRGPSGPPGPDGNKGEPGVVGAVGTAGPSGPSGLPGERGAAGIPGGKGEKGEPGLRGEIGNPGRDGARGAPGAVGAPGPAGATGDRGEAGAAGPAGPAGPRGSPGERGEVGPAGPNGFAGPAGAAGQPGAKGERGAKGPKGENGVVGPTGPVGAAGPAGPNGPPGPAGSRGDGGPPGMTGFPGAAGRTGPPGPSGISGPPGPPGPAGKEGLRGPRGDQGPVGRTGEVGAVGPPGFAGEKGPSGEAGTAGPPGTPGPQGLLGAPGILGLPGSRGERGLPGVAGAVGEPGPLGIAGPPGARGPPGAVGSPGVNGAPGEAGRDGNPGNDGPPGRDGQPGHKGERGYPGNIGPVGAAGAPGPHGPVGPAGKHGNRGETGPSGPVGPAGAVGPRGPSGPQGIRGDKGEPGEKGPRGLPGLKGHNGLQGLPGIAGHHGDQGAPGSVGPAGPRGPAGPSGPAGKDGRTGHPGTVGPAGIRGPQGHQGPAGPPGPPGPPGPPGVSGGGYDFGYDGDFYRADQPRSAPSLRPKDYEVDATLKSLNNQIETLLTPEGSRKNPARTCRDLRLSHPEWSSGYYWIDPNQGCTMDAIKVYCDFSTGETCIRAQPENIPAKNWYRSSKDKKHVWLGETINAGSQFEYNVEGVTSKEMATQLAFMRLLANYASQNITYHCKNSIAYMDEETGNLKKAVILQGSNDVELVAEGNSRFTYTVLVDGCSKKTNEWGKTIIEYKTNKPSRLPFLDIAPLDIGGADQEFFVDIGPVCFK

SEQ ID NO: 92 - protein, 1605 aa, Homo sapiens
  misc_feature (1)..(1605): human alpha1 chain of type IV collagen
MQGPEGPQGPPGQKGDTGEPGLPGTKGTRGPPGASGYPGNPGLPGIPGQDGPPGPPGIPGCNGTKGERGPLGPPGLPGFAGNPGPPGLPGMKGDPGEILGHVPGMLLKGERGFPGIPGTPGPPGLPGLQGPVGPPGFTGPPGPPGPPGPPGEKGQMGLSFQGPKGDKGDQGVSGPPGVPGQAQVQEKGDFATKGEKGQKGEPGFQGMPGVGEKGEPGKPGPRGKPGKDGDKGEKGSPGFPGEPGYPGLIGRQGPQGEKGEAGPPGPPGIVIGTGPLGEKGERGYPGTPGPRGEPGPKGFPGLPGQPGPPGLPVPGQAGAPGFPGERGEKGDRGFPGTSLPGPSGRDGLPGPPGSPGPPGQPGYTNGIVECQPGPPGDQGPPGIPGQPGFIGEIGEKGQKGESCLICDIDGYRGPPGPQGPPGEIGFPGQPGAKGDRGLPGRDGVAGVPGPQGTPGLIGQPGAKGEPGEFYFDLRLKGDKGDPGFPGQPGMPGRAGSPGRDGHPGLPGPKGSPGSVGLKGERGPPGGVGFPGSRGDTGPPGPPGYGPAGPIGDKGQAGFPGGPGSPGLPGPKGEPGKIVPLPGPPGAEGLPGSPGFPGPQGDRGFPGTPGRPGLPGEKGAVGQPGIGFPGPPGPKGVDGLPGDMGPPGTPGRPGFNGLPGNPGVQGQKGEPGVGLPGLKGLPGLPGIPGTPGEKGSIGVPGVPGEHGAIGPPGLQGIRGEPGPPGLPGSVGSPGVPGIGPPGARGPPGGQGPPGLSGPPGIKGEKGFPGFPGLDMPGPKGDKGAQGLPGITGQSGLPGLPGQQGAPGIPGFPGSKGEMGVMGTPGQPGSPGPVGAPGLPGEKGDHGFPGSSGPRGDPGLKGDKGDVGLPGKPGSMDKVDMGSMKGQKGDQGEKGQIGPIGEKGSRGDPGTPGVPGKDGQAGQPGQPGPKGDPGISGTPGAPGLPGPKGSVGGMGLPGTPGEKGVPGIPGPQGSPGLPGDKGAKGEKGQAGPPGIGIPGLRGEKGDQGIAGFPGSPGEKGEKGSIGIPGMPGSPGLKGSPGSVGYPGSPGLPGEKGDKGLPGLDGIPGVKGEAGLPGTPGPTGPAGQKGEPGSDGIPGSAGEKGEPGLPGRGFPGFPGAKGDKGSKGEVGFPGLAGSPGIPGSKGEQGFMGPPGPQGQPGLPGSPGHATEGPKGDRGPQGQPGLPGLPGPMGPPGLPGIDGVKGDKGNPGWPGAPGVPGPKGDPGFQGMPGIGGSPGITGSKGDMGPPGVPGFQGPKGLPGLQGIKGDQGDQGVPGAKGLPGPPGPPGPYDIIKGEPGLPGPEGPPGLKGLQGLPGPKGQQGVTGLVGIPGPPGIPGFDGAPGQKGEMGPAGPTGPRGFPGPPGPDGLPGSMGPPGTPSVDHGFLVTRHSQTIDDPQCPSGTKILYHGYSLLYVQGNERAHGQDLGTAGSCLRKFSTMPFLFCNINNVCNFASRNDYSYWLSTPEPMPMSMAPITGENIRPFISRCAVCEAPAMVMAVHSQTIQIPPCPSGWSSLWIGYSFVMHTSAGAEGSGQALASPGSCLEEFRSAPFIECHGRGTCNYYANAYSFWLATIERSEMFKKPTPSTLKAGELRTHVSRCQVCMRRT

SEQ ID NO: 93 - protein, 1712 aa, Homo sapiens
  misc_feature (1)..(1712): human alpha2 chain of type IV collagen
MGRDQRAVAGPALRRWLLLGTVTVGFLAQSVLAGVKKFDVPCGGRDCSGGCQCYPEKGGRGQPGPVGPQGYNGPPGLQGFPGLQGRKGDKGERGAPGVTGPKGDVGARGVSGFPGADGIPGHPGQGGPRGRPGYDGCNGTQGDSGPQGPPGSEGFTGPPGPQGPKGQKGEPYALPKEERDRYRGEPGEPGLVGFQGPPGRPGHVGQMGPVGAPGRPGPPGPPGPKGQQGNRGLGFYGVKGEKGDVGQPGPNGIPSDTLHPIIAPTGVTFHPDQYKGEKGSEGEPGIRGISLKGEEGIMGFPGLRGYPGLSGEKGSPGQKGSRGLDGYQGPDGPRGPKGEAGDPGPPGLPAYSPHPSLAKGARGDPGFPGAQGEPGSQGEPGDPGLPGPPGLSIGDGDQRRGLPGEMGPKGFIGDPGIPALYGGPPGPDGKRGPPGPPGLPGPPGPDGFLFGLKGAKGRAGFPGLPGSPGARGPKGWKGDAGECRCTEGDEAIKGLPGLPGPKGFAGINGEPGRKGDRGDPGQHGLPGFPGLKGVPGNIGAPGPKGAKGDSRTITTKGERGQPGVPGVPGMKGDDGSPGRDGLDGFPGLPGPPGDGIKGPPGDPGYPGIPGTKGTPGEMGPPGLGLPGLKGQRGFPGDAGLPGPPGFLGPPGPAGTPGQIDCDTDVKRAVGGDRQEAIQPGCIGGPKGLPGLPGPPGPTGAKGLRGIPGFAGADGGPGPRGLPGDAGREGFPGPPGFIGPRGSKGAVGLPGPDGSPGPIGLPGPDGPPGERGLPGEVLGAQPGPRGDAGVPGQPGLKGLPGDRGPPGFRGSQGMPGMPGLKGQPGLPGPSGQPGLYGPPGLHGFPGAPGQEGPLGLPGIPGREGLPGDRGDPGDTGAPGPVGMKGLSGDRGDAGFTGEQGHPGSPGFKGIDGMPGTPGLKGDRGSPGMDGFQGMPGLKGRPGFPGSKGEAGFFGIPGLKGLAGEPGFKGSRGDPGPPGPPPVILPGMKDIKGEKGDEGPMGLKGYLGAKGIQGMPGIPGLSGIPGLPGRPGHIKGVKGDIGVPGIPGLPGFPGVAGPPGITGFPGFIGSRGDKGAPGRAGLYGEIGATGDFGDIGDTINLPGRPGLKGERGTTGIPGLKGFFGEKGTEGDIGFPGITGVTGVQGPPGLKGQTGFPGLTGPPGSQGELGRIGLPGGKGDDGWPGAPGLPGFPGLRGIRGLHGLPGTKGFPGSPGSDIHGDPGFPGPPGERGDPGEANTLPGPVGVPGQKGDQGAPGERGPPGSPGLQGFPGITPPSNISGAPGDKGAPGIFGLKGYRGPPGPPGSAALPGSKGDTGNPGAPGTPGTKGWAGDSGPQGRPGVFGLPGEKGPRGEQGFMGNTGPTGAVGDRGPKGPKGDPGFPGAPGTVGAPGIAGIPQKIAVQPGTVGPQGRRGPPGAPGEMGPQGPPGEPGFRGAPGKAGPQGRGGVSAVPGFRGDEGPIGHQGPIGQEGAPGRPGSPGLPGMPGRSVSIGYLLVKHSQTDQEPMCPVGMNKLWSGYSLLYFEGQEKAHNQDLGLAGSCLARFSTMPFLYCNPGDVCYYASRNDKSYWLSTTAPLPMMPVAEDEIKPYISRCSVCEAPAIAIAVHSQDVSIPHCPAGWRSLWIGYSFLMHTAAGDEGGGQSLVSPGSCLEDFRATPFIECNGGRGTCHYYANKYSFWLTTIPEQSFQGSPSADTLKAGLIRTHISRCQVCMKNL

SEQ ID NO: 94 - protein, 1670 aa, Homo sapiens
  misc_feature (1)..(1670): human alpha3 chain of type IV collagen
MSARTAPRPQVLLLPLLLVLLAAAPAASKGCVCKDKGQCFCDGAKGEKGEKGFPGPPGSPGQKGFTGPEGLPGPQGPKGFPGLPGLTGSKGVRGISGLPGFSGSPGLPGTPGNTGPYGLVGVPGCSGSKGEQGFPGLPGTLGYPGIPGAAGLKGQKGAPAKEEDIELDAKGDPGLPGAPGPQGLPGPPGFPGPVGPPGPPGFFGFPGAMGPRGPKGHMGERVIGHKGERGVKGLTGPPGPPGTVIVTLTGPDNRTDLKGEKGDKGAMGEPGPPGPSGLPGESYGSEKGAPGDPGLQGKPGKDGVPGFPGSEGVKGNRGFPGLMGEDGIKGQKGDIGPPGFRGPTEYYDTYQEKGDEGTPGPPGPRGARGPQGPSGPPGVPGSPGSSRPGLRGAPGWPGLKGSKGERGRPGKDAMGTPGSPGCAGSPGLPGSPGPPGPPGDIVFRKGPPGDHGLPGYLGSPGIPGVDGPKGEPGLLCTQCPYIPGPPGLPGLPGLHGVKGIPGRQGAAGLKGSPGSPGNTGLPGFPGFPGAQGDPGLKGEKGETLQPEGQVGVPGDPGLRGQPGRKGLDGIPGTPGVKGLPGPKGELALSGEKGDQGPPGDPGSPGSPGPAGPAGPPGYGPQGEPGLQGTQGVPGAPGPPGEAGPRGELSVSTPVPGPPGPPGPPGHPGPQGPPGIPGSLGKCGDPGLPGPDGEPGIPGIGFPGPPGPKGDQGFPGTKGSLGCPGKMGEPGLPGKPGLPGAKGEPAVAMPGGPGTPGFPGERGNSGEHGEIGLPGLPGLPGTPGNEGLDGPRGDPGQPGPPGEQGPPGRCIEGPRGAQGLPGLNGLKGQQGRRGKTGPKGDPGIPGLDRSGFPGETGSPGIPGHQGEMGPLGQRGYPGNPGILGPPGEDGVIGMMGFPGAIGPPGPPGNPGTPGQRGSPGIPGVKGQRGTPGAKGEQGDKGNPGPSEISHVIGDKGEPGLKGFAGNPGEKGNRGVPGMPGLKGLKGLPGPAGPPGPRGDLGSTGNPGEPGLRGIPGSMGNMGMPGSKGKRGTLGFPGRAGRPGLPGIHGLQGDKGEPGYSEGTRPGPPGPTGDPGLPGDMGKKGEMGQPGPPGHLGPAGPEGAPGSPGSPGLPGKPGPHGDLGFKGIKGLLGPPGIRGPPGLPGFPGSPGPMGIRGDQGRDGIPGPAGEKGETGLLRAPPGPRGNPGAQGAKGDRGAPGFPGLPGRKGAMGDAGPRGPTGIEGFPGPPGLPGAIIPGQTGNRGPPGSRGSPGAPGPPGPPGSHVIGIKGDKGSMGHPGPKGPPGTAGDMGPPGRLGAPGTPGLPGPRGDPGFQGFPGVKGEKGNPGFLGSIGPPGPIGPKGPPGVRGDPGTLKIISLPGSPGPPGTPGEPGMQGEPGPPGPPGNLGPCGPRGKPGKDGKPGTPGPAGEKGNKGSKGEPGPAGSDGLPGLKGKRGDSGSPATWTTRGFVFTRHSQTTAIPSCPEGTVPLYSGFSFLFVQGNQRAHGQDLGTLGSCLQRFTTMPFLFCNVNDVCNFASRNDYSYWLSTPALMPMNMAPITGRALEPYISRCTVCEGPAIAIAVHSQTTDIPPCPHGWISLWKGFSFIMFTSAGSEGTGQALASPGSCLEEFRASPFLECHGRGTCNYYSNSYSFWLASLNPERMFRKPIPSTVKAGELEKIISRCQVCMKKRH

SEQ ID NO: 95 - protein, 1690 aa, Homo sapiens
  misc_feature (1)..(1690): human alpha4 chain of type IV collagen
MWSLHIVLMRCSFRLTKSLATGPWSLILILFSVQYVYGSGKKYIGPCGGRDCSVCHCVPEKGSRGPPGPPGPQGPIGPLGAPGPIGLSGEKGMRGDRGPPGAAGDKGDKGPTGVPGFPGLDGIPGHPGPPGPRGKPGMSGHNGSRGDPGFPGGRGALGPGGPLGHPGEKGEKGNSVFILGAVKGIQGDRGDPGLPGLPGSWGAGGPAGPTGYPGEPGLVGPPGQPGRPGLKGNPGVGVKGQMGDPGEVGQQGSPGPTLLVEPPDFCLYKGEKGIKGIPGMVGLPGPPGRKGESGIGAKGEKGIPGFPGPRGDPGSYGSPGFPGLKGELGLVGDPGLFGLIGPKGDPGNRGHPGPPGVLVTPPLPLKGPPGDPGFPGRYGETGDVGPPGPPGLLGRPGEACAGMIGPPGPQGFPGLPGLPGEAGIPGRPDSAPGKPGKPGSPGLPGAPGLQGLPGSSVIYCSVGNPGPQGIKGKVGPPGGRGPKGEKGNEGLCACEPGPMGPPGPPGLPGRQGSKGDLGLPGWLGTKGDPGPPGAEGPPGLPGKHGASGPPGNKGAKGDMVVSRVKGHKGERGPDGPPGFPGQPGSHGRDGHAGEKGDPGPPGDHEDATPGGKGFPGPLGPPGKAGPVGPPGLGFPGPPGERGHPGVPGHPGVRGPDGLKGQKGDTISCNVTYPGRHGPPGFDGPPGPKGFPGPQGAPGLSGSDGHKGRPGTPGTAEIPGPPGFRGDMGDPGFGGEKGSSPVGPPGPPGSPGVNGQKGIPGDPAFGHLGPPGKRGLSGVPGIKGPRGDPGCPGAEGPAGIPGFLGLKGPKGREGHAGFPGVPGPPGHSCERGAPGIPGQPGLPGYPGSPGAPGGKGQPGDVGPPGPAGMKGLPGLPGRPGAHGPPGLPGIPGPFGDDGLPGPPGPKGPRGLPGFPGFPGERGKPGAEGCPGAKGEPGEKGMSGLPGDRGLRGAKGAIGPPGDEGEMAIISQKGTPGEPGPPGDDGFPGERGDKGTPGMQGRRGEPGRYGPPGFHRGEPGEKGQPGPPGPPGPPGSTGLRGFIGFPGLPGDQGEPGSPGPPGFSGIDGARGPKGNKGDPASHFGPPGPKGEPGSPGCPGHFGASGEQGLPGIQGPRGSPGRPGPPGSSGPPGCPGDHGMPGLRGQPGEMGDPGPRGLQGDPGIPGPPGIKGPSGSPGLNGLHGLKGQKGTKGASGLHDVGPPGPVGIPGLKGERGDPGSPGISPPGPRGKKGPPGPPGSSGPPGPAGATGRAPKDIPDPGPPGDQGPPGPDGPRGAPGPPGLPGSVDLLRGEPGDCGLPGPPGPPGPPGPPGYKGFPGCDGKDGQKGPVGFPGPQGPHGFPGPPGEKGLPGPPGRKGPTGLPGPRGEPGPPADVDDCPRIPGLPGAPGMRGPEGAMGLPGMRGPSGPGCKGEPGLDGRRGVDGVPGSPGPPGRKGDTGEDGYPGGPGPPGPIGDPGPKGFGPGYLGGFLLVLHSQTDQEPTCPLGMPRLWTGYSLLYLEGQEKAHNQDLGLAGSCLPVFSTLPFAYCNIHQVCHYAQRNDRSYWLASAAPLPMMPLSEEAIRPYVSRCAVCEAPAQAVAVHSQDQSIPPCPQTWRSLWIGYSFLMHTGAGDQGGGQALMSPGSCLEDFRAAPFLECQGRQGTCHFFANKYSFWLTTVKADLQFSSAPAPDTLKESQAQRQKISRCQVCVKYS

SEQ ID NO: 96 - protein, 1696 aa, Homo sapiens
  misc_feature (1)..(1696): human alpha5 chain of type IV collagen
MEVDSGKTENRDWEGFCYSTSAYWKNLYDGLLACYGCSPGSKCDCSGIKGEKGERGFPGLEGHPGLPGFPGPEGPPGPRGQKGDDGIPGPPGPKGIRGPPGLPGFPGTPGLPGMPGHDGAPGPQGIPGCNGTKGERGFPGSPGFPGLQGPPGPPGIPGMKGEPGSIIMSSLPGPKGNPGYPGPPGIQGLPGPTGIPGPIGPPGPPGLMGPPGPPGLPGPKGNMGLNFQGPKGEKGEQGLQGPPGPPGQISEQKRPIDVEFQKGDQGLPGDRGPPGPPGIRGPPGPPGGEKGEKGEQGEPGKRGKPGKDGENGQPGIPGLPGDPGYPGEPGRDGEKGQKGDTGPPGPPGLVIPRPGTGITIGEKGNIGLPGLPGEKGERGFPGIQGPPGLPGPPGAAVMGPPGPPGFPGERGQKGDEGPPGISIPGPPGLDGQPGAPGLPGPPGPAGPHIPPSDEICEPGPPGPPGSPGDKGLQGEQGVKGDKGDTCFNCIGTGISGPPGQPGLPGLPGPPGSLGFPGQKGEKGQAGATGPKGLPGIPGAPGAPGFPGSKGEPGDILTFPGMKGDKGELGSPGAPGLPGLPGTPGQDGLPGLPGPKGEPGGITFKGERGPPGNPGLPGLPGNIGPMGPPGFGPPGPVGEKGIQGVAGNPGQPGIPGPKGDPGQTITQPGKPGLPGNPGRDGDVGLPGDPGLPGQPGLPGIPGSKGEPGIPGIGLPGPPGPKGFPGIPGPPGAPGTPGRIGLEGPPGPPGFPGPKGEPGFALPGPPGPPGLPGFKGALGPKGDRGFPGPPGPPGRTGLDGLPGPKGDVGPNGQPGPMGPPGLPGIGVQGPPGPPGIPGPIGQPGLHGIPGEKGDPGPPGLDVPGPPGERGSPGIPGAPGPIGPPGSPGLPGKAGASGFPGTKGEMGMMGPPGPPGPLGIPGRSGVPGLKGDDGLQGQPGLPGPTGEKGSKGEPGLPGPPGPMDPNLLGSKGEKGEPGLPGIPGVSGPKGYQGLPGDPGQPGLSGQPGLPGPPGPKGNPGLPGQPGLIGPPGLKGTIGDMGFPGPQGVEGPPGPSGVPGQPGSPGLPGQKGDKGDPGISSIGLPGLPGPKGEPGLPGYPGNPGIKGSVGDPGLPGLPGTPGAKGQPGLPGFPGTPGPPGPKGISGPPGNPGLPGEPGPVGGGGHPGQPGPPGEKGKPGQDGIPGPAGQKGEPGQPGFGNPGPPGLPGLSGQKGDGGLPGIPGNPGLPGPKGEPGFHGFPGVQGPPGPPGSPGPALEGPKGNPGPQGPPGRPGPTGFQGLPGPEGPPGLPGNGGIKGEKGNPGQPGLPGLPGLKGDQGPPGLQGNPGRPGLNGMKGDPGLPGVPGFPGMKGPSGVPGSAGPEGEPGLIGPPGPPGLPGPSGQSIIIKGDAGPPGIPGQPGLKGLPGPQGPQGLPGPTGPPGDPGRNGLPGFDGAGGRKGDPGLPGQPGTRGLDGPPGPDGLQGPPGPPGTSSVAHGFLITRHSQTTDAPQCPQGTLQVYEGFSLLYVQGNKRAHGQDLGTAGSCLRRFSTMPFMFCNINNVCNFASRNDYSYWLSTPEPMPMSMQPLKGQSIQPFISRCAVCEAPAVVIAVHSQTIQIPHCPQGWDSLWIGYSFMMHTSAGAEGSGQALASPGSCLEEFRSAPFIECHGRGTCNYYANSYSFWLATVDVSDMFSKPQSETLKAGDLRTRISRCQVCMKRT

SEQ ID NO: 97 - protein, 1708 aa, Homo sapiens
  misc_feature (1)..(1708): human alpha6 chain of type IV collagen
MLINKLWLLLVTLCLTEELAAAGEKSYGKPCGGQDCSGSCQCFPEKGARGRPGPIGIQGPTGPQGFTGSTGLSGLKGERGFPGLLGPYGPKGDKGPMGVPGFLGINGIPGHPGQPGPRGPPGLDGCNGTQGAVGFPGPDGYPGLLGPPGLPGQKGSKGDPVLAPGSFKGMKGDPGLPGLDGITGPQGAPGFPGAVGPAGPPGLQGPPGPPGPLGPDGNMGLGFQGEKGVKGDVGLPGPAGPPPSTGELEFMGFPKGKKGSKGEPGPKGFPGISGPPGFPGLGTTGEKGEKGEKGIPGLPGPRGPMGSEGVQGPPGQQGKKGTLGFPGLNGFQGIEGQKGDIGLPGPDVFIDIDGAVISGNPGDPGVPGLPGLKGDEGIQGLRGPSGVPGLPALSGVPGALGPQGFPGLKGDQGNPGRTTIGAAGLPGRDGLPGPPGPPGPPSPEFETETLHNKESGFPGLRGEQGPKGNLGLKGIKGDSGFCACDGGVPNTGPPGEPGPPGPWGLIGLPGLKGARGDRGSGGAQGPAGAPGLVGPLGPSGPKGKKGEPILSTIQGMPGDRGDSGSQGFRGVIGEPGKDGVPGLPGLPGLPGDGGQGFPGEKGLPGLPGEKGHPGPPGLPGNGLPGLPGPRGLPGDKGKDGLPGQQGLPGSKGDCCCREVGKGDLDTERGITLPCIIPGSYGPSGFPGTPGFPGPKGSRGLPGTPGQPGSSGSKGEPGSPGLVHLPELPGFPGPRGEKGLPGFPGLPGKDGLPGMIGSPGLPGSKGATGDIFGAENGAPGEQGLQGLTGHKGFLGDSGLPGLKGVHGKPGLLGPKGERGSPGTPGQVGQPGTPGSSGPYGIKGKSGLPGAPGFPGISGHPGKKGTRGKKGPPGSIVKKGLPGLKGLPGNPGLVGLKGSPGSPGVAGLPALSGPKGEKGSVGFVGFPGIPGLPGIPGTRGLKGIPGSTGKMGPSGRAGTPGEKGDRGNPGPVGIPSPRRPMSNLWLKGDKGSQGSAGSNGFPGPRGDKGEAGRPGPPGLPGAPGLPGIIKGVSGKPGPPGFMGIRGLPGLKGSSGITGFPGMPGESGSQGIRGSPGLPGASGLPGLKGDNGQTVEISGSPGPKGQPGESGFKGTKGRDGLIGNIGFPGNKGEDGKVGVSGDVGLPGAPGFPGVAGMRGEPGLPGSSGHQGAIGPLGSPGLIGPKGFPGFPGLHGLNGLPGTKGTHGTPGPSITGVPGPAGLPGPKGEKGYPGIGIGAPGKPGLRGQKGDRGFPGLQGPAGLPGAPGISLPSLIAGQPGDPGRPGLDGERGRPGPAGPPGPPGPSSNQGDTGDPGFPGIPGPKGPKGDQGIPGFSGLPGELGLKGMRGEPGFMGTPGKVGPPGDPGFPGMKGKAGPRGSSGLQGDPGQTPTAEAVQVPPGPLGLPGIDGIPGLTGDPGAQGPVGLQGSKGLPGIPGKDGPSGLPGPPGALGDPGLPGLQGPPGFEGAPGQQGPFGMPGMPGQSMRVGYTLVKHSQSEQVPPCPIGMSQLWVGYSLLFVEGQEKAHNQDLGFAGSCLPRFSTMPFIYCNINEVCHYARRNDKSYWLSTTAPIPMMPVSQTQIPQYISRCSVCEAPSQAIAVHSQDITIPQCPLGWRSLWIGYSFLMHTAAGAEGGGQSLVSPGSCLEDFRATPFIECSGARGTCHYFANKYSFWLTTVEERQQFGELPVSETLKAGQLHTRVSRCQVCMKSL

SEQ ID NO: 98 - protein, 266 aa, Artificial Sequence
  Synthetic: LAIR-1
QEEDLPRPSISAEPGTVIPLGSHVTFVCRGPVGVQTFRLERESRSTYNDTEDVSQASPSESEARFRIDSVSEGNAGPYRCIYYKPPKWSEQSDYLELLVKETSGGPDSPDTEPGSSAGPTQRPSDNSHNEHAPASQGLKAEHLYILIGVSVVFLFCLLLLVLFCLHRQNQIKQGPPRSKDEEQKPQQRPDLAVDVLERTADKATVNGLPEKDRETDTSALAAGSSQEVTYAQLDHWALTQRTARAVSPQSTKPMAESITYAAVARH

SEQ ID NO: 99 - protein, 131 aa, Artificial Sequence
  Synthetic: LAIR-2
QEGALPRPSISAEPGTVISPGSHVTFMCRGPVGVQTFRLEREDRAKYKDSYNVFRLGPSESEARFHIDSVSEGNAGLYRCLYYKPPGWSEHSDFLELLVKESSGGPDSPDTEPGSSAGTVPGTEASGFDAP

SEQ ID NO: 100 - protein, 410 aa, Artificial Sequence
  Synthetic: Glycoprotein IV (CD36 extracellular domain)
GDLLIQKTIKKQVVLEEGTIAFKNWVKTGTEVYRQFWIFDVQNPQEVMMNSSNIQVKQRGPYTYRVRFLAKENVTQDAEDNTVSFLQPNGAIFEPSLSVGTEADNFTVLNLAVAAASHIYQNQFVQMILNSLINKSKSSMFQVRTLRELLWGYRDPFLSLVPYPVTTTVGLFYPYNNTADGVYKVFNGKDNISKVAIIDTYKGKRNLSYWESHCDMINGTDAASFPPFVEKSQVLQFFSSDICRSIYAVFESDVNLKGIPVYRFVLPSKAFASPVENPDNYCFCTEKIISKNCTSYGVLDISKCKEGRPVYISLPHFLYASPDVSEPIDGLNPNEEEHRTYLDIEPITGFTLQFAKRLQVNLLVKPSEKIQVLKNLKRNYIVPILWLNETGTIGDEKANMFRSQVTGKIN

SEQ ID NO: 101 - protein, 1219 aa, Artificial Sequence
  Synthetic: Nidogen
LSRQELFPFGPGQGDLELEDGDDFVSPALELSGALRFYDRSDIDAVYVTTNGIIATSEPPAKESHPGLFPPTFGAVAPFLADLDTTDGLGKVYYREDLSPSITQRAAECVHRGFPEISFQPSSAVVVTWESVAPYQGPSRDPDQKGKRNTFQAVLASSDSSSYAIFLYPEDGLQFHTTFSKKENNQVPAVVAFSQGSVGFLWKSNGAYNIFANDRESVENLAKSSNSGQQGVWVFEIGSPATTNGVVPADVILGTEDGAEYDDEDEDYDLATTRLGLEDVGTTPFSYKALRRGGADTYSVPSVLSPRRAATERPLGPPTERTRSFQLAVETFHQQHPQVIDVDEVEETGVVFSYNTDSRQTCANNRHQCSVHAECRDYATGFCCSCVAGYTGNGRQCVAEGSPQRVNGKVKGRIFVGSSQVPIVFENTDLHSYVVMNHGRSYTAISTIPETVGYSLLPLAPVGGIIGWMFAVEQDGFKNGFSITGGEFTRQAEVTFVGHPGNLVIKQRFSGIDEHGHLTIDTELEGRVPQIPFGSSVHIEPYTELYHYSTSVITSSSTREYTVTEPERDGASPSRIYTYQWRQTITFQECVHDDSRPALPSTQQLSVDSVFVLYNQEEKILRYALSNSIGPVREGSPDALQNPCYIGTHGCDTNAACRPGPRTQFTCECSIGFRGDGRTCYDIDECSEQPSVCGSHTICNNHPGTFRCECVEGYQFSDEGTCVAVVDQRPINYCETGLHNCDIPQRAQCIYTGGSSYTCSCLPGFSGDGQACQDVDECQPSRCHPDAFCYNTPGSFTCQCKPGYQGDGFRCVPGEVEKTRCQHEREHILGAAGATDPQRPIPPGLFVPECDAHGHYAPTQCHGSTGYCWCVDRDGREVEGTRTRPGMTPPCLSTVAPPIHQGPAVPTAVIPLPPGTHLLFAQTGKIERLPLEGNTMRKTEAKAFLHVPAKVIIGLAFDCVDKMVYWTDITEPSIGRASLHGGEPTTIIRQDLGSPEGIAVDHLGRNIFWTDSNLDRIEVAKLDGTQRRVLFETDLVNPRGIVTDSVRGNLYWTDWNRDNPKIETSYMDGTNRRILVQDDLGLPNGLTFDAFSSQLCWVDAGTNRAECLNPSQPSRRKALEGLQYPFAVTSYGKNLYFTDWKMNSVVALDLAISKETDAFQPHKQTRLYGITTALSQCPQGHNYCSVNNGGCTHLCLATPGSRTCRCPDNTLGVDCIEQK

SEQ ID NO: 102 - protein, 4370 aa, Artificial Sequence
  Synthetic: Perlecan
VTHGLRAYDGLSLPEDIETVTASQMRWTHSYLSDDEDMLADSISGDDLGSGDLGSGDFQMVYFRALVNFTRSIEYSPQLEDAGSREFREVSEAVVDTLESEYLKIPGDQVVSVVFIKELDGWVFVELDVGSEGNADGAQIQEMLLRVISSGSVASYVTSPQGFQFRRLGTVPQFPRACTEAEFACHSYNECVALEYRCDRRPDCRDMSDELNCEEPVLGISPTFSLLVETTSLPPRPETTIMRQPPVTHAPQPLLPGSVRPLPCGPQEAACRNGHCIPRDYLCDGQEDCEDGSDELDCGPPPPCEPNEFPCGNGHCALKLWRCDGDFDCEDRTDEANCPTKRPEEVCGPTQFRCVSTNMCIPASFHCDEESDCPDRSDEFGCMPPQVVTPPRESIQASRGQTVTFTCVAIGVPTPIINWRLNWGHIPSHPRVTVTSEGGRGTLIIRDVKESDQGAYTCEAMNARGMVFGIPDGVLELVPQRGPCPDGHFYLEHSAACLPCFCFGITSVCQSTRRFRDQIRLRFDQPDDFKGVNVTMPAQPGTPPLSSTQLQIDPSLHEFQLVDLSRRFLVHDSFWALPEQFLGNKVDSYGGSLRYNVRYELARGMLEPVQRPDVVLMGAGYRLLSRGHTPTQPGALNQRQVQFSEEHWVHESGRPVQRAELLQVLQSLEAVLIQTVYNTKMASVGLSDIAMDTTVTHATSHGRAHSVEECRCPIGYSGLSCESCDAHFTRVPGGPYLGTCSGCNCNGHASSCDPVYGHCLNCQHNTEGPQCNKCKAGFFGDAMKATATSCRPCPCPYIDASRRFSDTCFLDTDGQATCDACAPGYTGRRCESCAPGYEGNPIQPGGKCRPVNQEIVRCDERGSMGTSGEACRCKNNVVGRLCNECADGSFHLSTRNPDGCLKCFCMGVSRHCTSSSWSRAQLHGASEEPGHFSLTNAASTHTTNEGIFSPTPGELGFSSFHRLLSGPYFWSLPSRFLGDKVTSYGGELRFTVTQRSQPGSTPLHGQPLVVLQGNNIILEHHVAQEPSPGQPSTFIVPFREQAWQRPDGQPATREHLLMALAGIDTLLIRASYAQQPAESRVSGISMDVAVPEETGQDPALEVEQCSCPPGYRGPSCQDCDTGYTRTPSGLYLGTCERCSCHGHSEACEPETGACQGCQHHTEGPRCEQCQPGYYGDAQRGTPQDCQLCPCYGDPAAGQAAHTCFLDTDGHPTCDACSPGHSGRHCERCAPGYYGNPSQGQPCQRDSQVPGPIGCNCDPQGSVSSQCDAAGQCQCKAQVEGLTCSHCRPHHFHLSASNPDGCLPCFCMGITQQCASSAYTRHLISTHFAPGDFQGFALVNPQRNSRLTGEFTVEPVPEGAQLSFGNFAQLGHESFYWQLPETYQGDKVAAYGGKLRYTLSYTAGPQGSPLSDPDVQITGNNIMLVASQPALQGPERRSYEIMFREEFWRRPDGQPATREHLLMALADLDELLIRATFSSVPLAASISAVSLEVAQPGPSNRPRALEVEECRCPPGYIGLSCQDCAPGYTRTGSGLYLGHCELCECNGHSDLCHPETGACSQCQHNAAGEFCELCAPGYYGDATAGTPEDCQPCACPLTNPENMFSRTCESLGAGGYRCTACEPGYTGQYCEQCGPGYVGNPSVQGGQCLPETNQAPLVVEVHPARSIVPQGGSHSLRCQVSGSPPHYFYWSREDGRPVPSGTQQRHQGSELHFPSVQPSDAGVYICTCRNLHQSNTSRAELLVTEAPSKPITVTVEEQRSQSVRPGADVTFICTAKSKSPAYTLVWTRLHNGKLPTRAMDFNGILTIRNVQLSDAGTYVCTGSNMFAMDQGTATLHVQASGTLSAPVVSIHPPQLTVQPGQLAEFRCSATGSPTPTLEWTGGPGGQLPAKAQIHGGILRLPAVEPTDQAQYLCRAHSSAGQQVARAVLHVHGGGGPRVQVSPERTQVHAGRTVRLYCRAAGVPSATITWRKEGGSLPPQARSERTDIATLLIPAITTADAGFYLCVATSPAGTAQARIQVVVLSASDASPPPVKIESSSPSVTEGQTLDLNCVVAGSAHAQVTWYRRGGSLPPHTQVHGSRLRLPQVSPADSGEYVCRVENGSGPKEASITVSVLHGTHSGPSYTPVPGSTRPIRIEPSSSHVAEGQTLDLNCVVPGQAHAQVTWHKRGGSLPARHQTHGSLLRLHQVTPADSGEYVCHVVGTSGPLEASVLVTIEASVIPGPIPPVRIESSSSTVAEGQTLDLSCVVAGQAHAQVTWYKRGGSLPARHQVRGSRLYIFQASPADAGQYVCRASNGMEASITVTVTGTQGANLAYPAGSTQPIRIEPSSSQVAEGQTLDLNCVVPGQSHAQVTWHKRGGSLPVRHQTHGSLLRLYQASPADSGEYVCRVLGSSVPLEASVLVTIEPAGSVPALGVTPTVRIESSSSQVAEGQTLDLNCLVAGQAHAQVTWHKRGGSLPARHQVHGSRLRLLQVTPADSGEYVCRVVGSSGTQEASVLVTIQQRLSGSHSQGVAYPVRIESSSASLANGHTLDLNCLVASQAPHTITWYKRGGSLPSRHQIVGSRLRIPQVTPADSGEYVCHVSNGAGSRETSLIVTIQGSGSSHVPSVSPPIRIESSSPTVVEGQTLDLNCVVARQPQAIITWYKRGGSLPSRHQTHGSHLRLHQMSVADSGEYVCRANNNIDALEASIVISVSPSAGSPSAPGSSMPIRIESSSSHVAEGETLDLNCVVPGQAHAQVTWHKRGGSLPSHHQTRGSRLRLHHVSPADSGEYVCRVMGSSGPLEASVLVTIEASGSSAVHVPAPGGAPPIRIEPSSSRVAEGQTLDLKCVVPGQAHAQVTWHKRGGNLPARHQVHGPLLRLNQVSPADSGEYSCQVTGSSGTLEASVLVTIEPSSPGPIPAPGLAQPIYIEASSSHVTEGQTLDLNCVVPGQAHAQVTWYKRGGSLPARHQTHGSQLRLHLVSPADSGEYVCRAASGPGPEQEASFTVTVPPSEGSSYRLRSPVISIDPPSSTVQQGQDASFKCLIHDGAAPISLEWKTRNQELEDNVHISPNGSIITIVGTRPSNHGTYRCVASNAYGVAQSVVNLSVHGPPTVSVLPEGPVWVKVGKAVTLECVSAGEPRSSARWTRISSTPAKLEQRTYGLMDSHAVLQISSAKPSDAGTYVCLAQNALGTAQKQVEVIVDTGAMAPGAPQVQAEEAELTVEAGHTATLRCSATGSPAPTIHWSKLRSPLPWQHRLEGDTLIIPRVAQQDSGQYICNATSPAGHAEATIILHVESPPYATTVPEHASVQAGETVQLQCLAHGTPPLTFQWSRVGSSLPGRATARNELLHFERAAPEDSGRYRCRVTNKVGSAEAFAQLLVQGPPGSLPATSIPAGSTPTVQVTPQLETKSIGASVEFHCAVPSDRGTQLRWFKEGGQLPPGHSVQDGVLRIQNLDQSCQGTYICQAHGPWGKAQASAQLVIQALPSVLINIRTSVQTVVVGHAVEFECLALGDPKPQVTWSKVGGHLRPGIVQSGGVVRIAHVELADAGQYRCTATNAAGTTQSHVLLLVQALPQISMPQEVRVPAGSAAVFPCIASGYPTPDISWSKLDGSLPPDSRLENNMLMLPSVRPQDAGTYVCTATNRQGKVKAFAHLQVPERVVPYFTQTPYSFLPLPTIKDAYRKFEIKITFRPDSADGMLLYNGQKRVPGSPTNLANRQPDFISFGLVGGRPEFRFDAGSGMATIRHPTPLALGHFHTVTLLRSLTQGSLIVGDLAPVNGTSQGKFQGLDLNEELYLGGYPDYGAIPKAGLSSGFIGCVRELRIQGEEIVFHDLNLTAHGISHCPTCRDRPCQNGGQCHDSESSSYVCVCPAGFTGSRCEHSQALHCHPEACGPDATCVNRPDGRGYTCRCHLGRSGLRCEEGVTVTTPSLSGAGSYLALPALTNTHHELRLDVEFKPLAPDGVLLFSGGKSGPVEDFVSLAMVGGHLEFRYELGSGLAVLRSAEPLALGRWHRVSAERLNKDGSLRVNGGRPVLRSSPGKSQGLNLHTLLYLGGVEPSVPLSPATNMSAHFRGCVGEVSVNGKRLDLTYSFLGSQGIGQCYDSSPCERQPCQHGATCMPAGEYEFQCLCRDGFKGDLCEHEENPCQLREPCLHGGTCQGTRCLCLPGFSGPRCQQGSGHGIAESDWHLEGSGGNDAPGQYGAYFHDDGFLAFPGHVFSRSLPEVPETIELEVRTSTASGLLLWQGVEVGEAGQGKDFISLGLQDGHLVFRYQLGSGEARLVSEDPINDGEWHRVTALREGRRGSIQVDGEELVSGRSPGPNVAVNAKGSVYIGGAPDVATLTGGRFSSGITGCVKNLVLHSARPGAPPPQPLDLQHRAQAGANTRPCPS

SEQ ID NO: 103 - protein, 331 aa, Artificial Sequence
  Synthetic: Biglycan
DEEASGADTSGVLDPDSVTPTYSAMCPFGCHCHLRVVQCSDLGLKSVPKEISPDTTLLDLQNNDISELRKDDFKGLQHLYALVLVNNKISKIHEKAFSPLRKLQKLYISKNHLVEIPPNLPSSLVELRIHDNRIRKVPKGVFSGLRNMNCIEMGGNPLENSGFEPGAFDGLKLNYLRISEAKLTGIPKDLPETLNELHLDHNKIQAIELEDLLRYSKLYRLGLGHNQIRMIENGSLSFLPTLRELHLDNNKLARVPSGLPDLKLLQVVYLHSNNITKVGVNDFCPMGFGVKRAYYNGISLFNNPVPYWEVQPATFRCVTDRLAIQFGNYKK

SEQ ID NO: 104 - protein, 329 aa, Artificial Sequence
  Synthetic: Decorin
DEASGIGPEVPDDRDFEPSLGPVCPFRCQCHLRVVQCSDLGLDKVPKDLPPDTTLLDLQNNKITEIKDGDFKNLKNLHALILVNNKISKVSPGAFTPLVKLERLYLSKNQLKELPEKMPKTLQELRAHENEITKVRKVTFNGLNQMIVIELGTNPLKSSGIENGAFQGMKKLSYIRIADTNITSIPQGLPPSLTELHLDGNKISRVDAASLKGLNNLAKLGLSFNSISAVDNGSLANTPHLRELHLDNNKLTRVPGGLAEHKYIQVVYLHNNNISVVGSSDFCPPGHNTKKASYSGVSLFSNPVQYWEIQPSTFRCVYVRSAIQLGNYK

SEQ ID NO: 105 - protein, 348 aa, Artificial Sequence
  Synthetic: Asporin
DMEDTDDDDDDDDDDDDDDEDNSLFPTREPRSHFFPFDLFPMCPFGCQCYSRVVHCSDLGLTSVPTNIPFDTRMLDLQNNKIKEIKENDFKGLTSLYGLILNNNKLTKIHPKAFLTTKKLRRLYLSHNQLSEIPLNLPKSLAELRIHENKVKKIQKDTFKGMNALHVLEMSANPLDNNGIEPGAFEGVTVFHIRIAEAKLTSVPKGLPPTLLELHLDYNKISTVELEDFKRYKELQRLGLGNNKITDIENGSLANIPRVREIHLENNKLKKIPSGLPELKYLQIIFLHSNSIARVGVNDFCPTVPKMKKSLYSAISLFNNPVKYWEMQPATFRCVLSRMSVQLGNFGM

SEQ ID NO: 106 - protein, 358 aa, Artificial Sequence
  Synthetic: Fibromodulin
QYEDDPHWWFHYLRSQQSTYYDPYDPYPYETYEPYPYGVDEGPAYTYGSPSPPDPRDCPQECDCPPNFPTAMYCDNRNLKYLPFVPSRMKYVYFQNNQITSIQEGVFDNATGLLWIALHGNQITSDKVGRKVFSKLRHLERLYLDHNNLTRMPGPLPRSLRELHLDHNQISRVPNNALEGLENLTALYLQHNEIQEVGSSMRGLRSLILLDLSYNHLRKVPDGLPSALEQLYMEHNNVYTVPDSYFRGAPKLLYVRLSHNSLTNNGLASNTFNSSSLLELDLSYNQLQKIPPVNTNLENLYLQGNRINEFSISSFCTVVDVVNFSKLQVLRLDGNEIKRSAMPADAPLCLRLASLIEI

SEQ ID NO: 107 - protein, 320 aa, Artificial Sequence
  Synthetic: Lumican
QYYDYDFPLSIYGQSSPNCAPECNCPESYPSAMYCDELKLKSVPMVPPGIKYLYLRNNQIDHIDEKAFENVTDLQWLILDHNLLENSKIKGRVFSKLKQLKKLHINHNNLTESVGPLPKSLEDLQLTHNKITKLGSFEGLVNLTFIHLQHNRLKEDAVSAAFKGLKSLEYLDLSFNQIARLPSGLPVSLLTLYLDNNKISNIPDEYFKRFNALQYLRLSHNELADSGIPGNSFNVSSLVELDLSYNKLKNIPTVNENLENYYLEVNQLEKFDIKSFCKILGPLSYSKIKHLRLDGNRISETSLPPDMYECLRVANEVTLN

SEQ ID NO: 108 - protein, 362 aa, Artificial Sequence
  Synthetic: PRELP
QPTRRPRPGTGPGRRPRPRPRPTPSFPQPDEPAEPTDLPPPLPPGPPSIFPDCPRECYCPPDFPSALYCDSRNLRKVPVIPPRIHYLYLQNNFITELPVESFQNATGLRWINLDNNRIRKIDQRVLEKLPGLVFLYMEKNQLEEVPSALPRNLEQLRLSQNHISRIPPGVFSKLENLLLLDLQHNRLSDGVFKPDTFHGLKNLMQLNLAHNILRKMPPRVPTAIHQLYLDSNKIETIPNGYFKSFPNLAFIRLNYNKLTDRGLPKNSFNISNLLVLHLSHNRISSVPAINNRLEHLYLNNNSIEKINGTQICPNDLVAFHDFSSDLENVPHLRYLRLDGNYLKPPIPLDLMMCFRLLQSVVI

SEQ ID NO: 109 - protein, 401 aa, Artificial Sequence
  Synthetic: Osteoadherin/Osteomodulin
QYETYQWDEDYDQEPDDDYQTGFPFRQNVDYGVPFHQYTLGCVSECFCPTNFPSSMYCDNRKLKTIPNIPMHIQQLYLQFNEIEAVTANSFINATHLKEINLSHNKIKSQKIDYGVFAKLPNLLQLHLEHNNLEEFPFPLPKSLERLLLGYNEISKLQTNAMDGLVNLTMLDLCYNYLHDSLLKDKIFAKMEKLMQLNLCSNRLESMPPGLPSSLMYLSLENNSISSIPEKYFDKLPKLHTLRMSHNKLQDIPYNIFNLPNIVELSVGHNKLKQAFYIPRNLEHLYLQNNEIEKMNLTVMCPSIDPLHYHHLTYIRVDQNKLKEPISSYIFFCFPHIHTIYYGEQRSTNGQTIQLKTQVFRRFPDDDDESEDHDDPDNAHESPEQEGAEGHFDLHYYENQE

SEQ ID NO: 110 - protein, 313 aa, Artificial Sequence
  Synthetic: Opticin
ASLPRKERKRREEQMPREGDSFEVLPLRNDVLNPDNYGEVIDLSNYEELTDYGDQLPEVKVTSLAPATSISPAKSTTAPGTPSSNPTMTRPTTAGLLLSSQPNHGLPTCLVCVCLGSSVYCDDIDLEDIPPLPRRTAYLYARFNRISRIRAEDFKGLTKLKRIDLSNNLISSIDNDAFRLLHALQDLILPENQLEALPVLPSGIEFLDVRLNRLQSSGIQPAAFRAMEKLQFLYLSDNLLDSIPGPLPLSLRSVHLQNNLIETMQRDVFCDPEEHKHTRRQLEDIRLDGNPINLSLFPSAYFCLPRLPIGRFT

SEQ ID NO: 111 - protein, 278 aa, Artificial Sequence
  Synthetic: Osteoglycin/Mimecan
PPTQQDSRIIYDYGTDNFEESIFSQDYEDKYLDGKNIKEKETVIIPNEKSLQLQKDEAITPLPPKKENDEMPTCLLCVCLSGSVYCEEVDIDAVPPLPKESAYLYARFNKIKKLTAKDFADIPNLRRLDFTGNLIEDIEDGTFSKLSLLEELSLAENQLLKLPVLPPKLTLFNAKYNKIKSRGIKANAFKKLNNLTFLYLDHNALESVPLNLPESLRVIHLQFNNIASITDDTFCKANDTSYIRDRIEEIRLEGNPIVLGKHPNSFICLKRLPIGSYF

SEQ ID NO: 112 - protein, 732 aa, Artificial Sequence
  Synthetic: Chondroadherin
QRCPQACICDNSRRHVACRYQNLTEVPDAIPELTQRLDLQGNLLKVIPAAAFQGVPHLTHLDLRHCEVELVAEGAFRGLGRLLLLNLASNHLRELPQEALDGLGSLRRLELEGNALEELRPGTFGALGALATLNLAHNALVYLPAMAFQGLLRVRWLRLSHNALSVLAPEALAGLPALRRLSLHHNELQALPGPVLSQARGLARLELGHNPLTYAGEEDGLALPGLRELLLDGGALQALGPRAFAHCPRLHTLDLRGNQLDTLPPLQGPGQLRRLRLQGNPLWCGCQARPLLEWLARARVRSDGACQGPRRLRGEALDALRPWDLRCPGDAAQEEEELEERAVAGPRAPPRGPPRGPGEERAVAPCPRACVCVPESRHSSCEGCGLQAVPRGFPSDTQLLDLRRNHFPSVPRAAFPGLGHLVSLHLQHCGIAELEAGALAGLGRLIYLYLSDNQLAGLSAAALEGAPRLGYLYLERNRFLQVPGAALRALPSLFSLHLQDNAVDRLAPGDLGRTRALRWVYLSGNRITEVSLGALGPARELEKLHLDRNQLREVPTGALEGLPALLELQLSGNPLRALRDGAFQPVGRSLQHLFLNSSGLEQICPGAFSGLGPGLQSLHLQKNQLRALPALPSLSQLELIDLSSNPFHCDCQLLPLHRWLTGLNLRVGATCATPPNARGQRVKAAAAVFEDCPGWAARKAKRTPASRPSARRTPIKGRQCGADKVGKEKGRL

SEQ ID NO: 113 - protein, 594 aa, Artificial Sequence
  Synthetic: Podocan
GPVLAVRAPGFGRSGGHSLSPEENEFAEEEPVLVLSPEEPGPGPAAVSCPRDCACSQEGVVDCGGIDLREFPGDLPEHTNHLSLQNNQLEKIYPEELSRLHRLETLNLQNNRLTSRGLPEKAFEHLTNLNYLYLANNKLTLAPRFLPNALISVDFAANYLTKIYGLTFGQKPNLRSVYLHNNKLADAGLPDNMFNGSSNVEVLILSSNFLRHVPKHLPPALYKLHLKNNKLEKIPPGAFSELSSLRELYLQNNYLTDEGLDNETFWKLSSLEYLDLSSNNLSRVPAGLPRSLVLLHLEKNAIRSVDANVLTPIRSLEYLLLHSNQLREQGIHPLAFQGLKRLHTVHLYNNALERVPSGLPRRVRTLMILHNQITGIGREDFATTYFLEELNLSYNRITSPQVHRDAFRKLRLLRSLDLSGNRLHTLPPGLPRNVHVLKVKRNELAALARGALVGMAQLRELYLTSNRLRSRALGPRAWVDLAHLQLLDIAGNQLTEIPEGLPESLEYLYLQNNKISAVPANAFDSTPNLKGIFLRFNKLAVGSVVDSAFRRLKHLQVLDIEGNLEFGDISKDRGRLGKEKEEEEEEEEEEEETR

SEQ ID NO: 114 - protein, 330 aa, Homo sapiens [sequence omitted]

SEQ ID NO: 115 - protein, 232 aa, Homo sapiens
  misc_feature (1)..(232): Human IgG1 Fc domain (amino acid sequence)
EPKSCDKTHTCPPCPAPELLGGPSVFLFPPKPKDTLMISRTPEVTCVVVDVSHEDPEVKFNWYVDGVEVHNAKTKPREEQYNSTYRVVSVLTVLHQDWLNGKEYKCKVSNKALPAPIEKTISKAKGQPREPQVYTLPPSRDELTKNQVSLTCLVKGFYPSDIAVEWESNGQPENNYKTTPPVLDSDGSFFLYSKLTVDKSRWQQGNVFSCSVMHEALHNHYTQKSLSLSPGK

SEQ ID NO: 116 - protein, 197 aa, Artificial Sequence
  Synthetic: HSA domain I
DAHKSEVAHRFKDLGEENFKALVLIAFAQYLQQCPFEDHVKLVNEVTEFAKTCVADESAENCDKSLHTLFGDKLCTVATLRETYGEMADCCAKQEPERNECFLQHKDDNPNLPRLVRPEVDVMCTAFHDNEETFLKKYLYEIARRHPYFYAPELLFFAKRYKAAFTECCQAADKAACLLPKLDELRDEGKASSAKQR

SEQ ID NO: 117 - protein, 197 aa, Artificial Sequence
  Synthetic: HSA domain II
GKASSAKQRLKCASLQKFGERAFKAWAVARLSQRFPKAEFAEVSKLVTDLTKVHTECCHGDLLECADDRADLAKYICENQDSISSKLKECCEKPLLEKSHCIAEVENDEMPADLPSLAADFVESKDVCKNYAEAKDVFLGMFLYEYARRHPDYSVVLLLRLAKTYETTLEKCCAAADPHECYAKVFDEFKPLVEEPQ

SEQ ID NO: 118 - protein, 200 aa, Artificial Sequence
  Synthetic: HSA domain III
NLIKQNCELFEQLGEYKFQNALLVRYTKKVPQVSTPTLVEVSRNLGKVGSKCCKHPEAKRMPCAEDYLSVVLNQLCVLHEKTPVSDRVTKCCTESLVNRRPCFSALEVDETYVPKEFNAETFTFHADICTLSEKERQIKKQTALVELVKHKPKATKEQLKAVMDDFAAFVEKCCKADDKETCFAEEGKKLVAASQAALGL

SEQ ID NO: 119 - protein, 50 aa, Artificial Sequence
  Synthetic: Linker
LEAEAAAKEAAAKEAAAKEAAAKALEAEAAAKEAAAKEAAAKEAAAKALE

SEQ ID NO: 120 - protein, 1071 aa, Artificial Sequence
  Synthetic: Lumican-MSA-IL2
QYYDYDIPLFMYGQISPNCAPECNCPHSYPTAMYCDDLKLKSVPMVPPGIKYLYLRNNQIDHIDEKAFENVTDLQWLILDHNLLENSKIKGKVFSKLKQLKKLHINYNNLTESVGPLPKSLQDLQLTNNKISKLGSFDGLVNLTFIYLQHNQLKEDAVSASLKGLKSLEYLDLSFNQMSKLPAGLPTSLLTLYLDNNKISNIPDEYFKRFTGLQYLRLSHNELADSGVPGNSFNISSLLELDLSYNKLKSIPTVNENLENYYLEVNELEKFDVKSFCKILGPLSYSKIKHLRLDGNPLTQSSLPPDMYECLRVANEITVNGGGSGGGSEAHKSEIAHRYNDLGEQHFKGLVLIAFSQYLQKCSYDEHAKLVQEVTDFAKTCVADESAANCDKSLHTLFGDKLCAIPNLRENYGELADCCTKQEPERNECFLQHKDDNPSLPPFERPEAEAMCTSFKENPTTFMGHYLHEVARRHPYFYAPELLYYAEQYNEILTQCCAEADKESCLTPKLDGVKEKALVSSVRQRMKCSSMQKFGERAFKAWAVARLSQTFPNADFAEITKLATDLTKVNKECCHGDLLECADDRAELAKYMCENQATISSKLQTCCDKPLLKKAHCLSEVEHDTMPADLPAIAADFVEDQEVCKNYAEAKDVFLGTFLYEYSRRHPDYSVSLLLRLAKKYEATLEKCCAEANPPACYGTVLAEFQPLVEEPKNLVKTNCDLYEKLGEYGFQNAILVRYTQKAPQVSTPTLVEAARNLGRVGTKCCTLPEDQRLPCVEDYLSAILNRVCLLHEKTPVSEHVTKCCSGSLVERRPCFSALTVDETYVPKEFKAETFTFHSDICTLPEKEKQIKKQTALAELVKHKPKATAEQLKTVMDDFAQFLDTCCKAADKDTCFSTEGPNLVTRCKDALAGGGSAPTSSSTSSSTAEAQQQQQQQQQQQQHLEQLLMDLQELLSRMENYRNLKLPRMLTFKFYLPKQATELKDLQCLEDELGPLRHVLDLTQSKSFQLEDAENFISNIRVTVVKLKGSDNTFECQFDDESATVVDFLRRWIAFCQSIISTSPQHHHHHH

SEQ ID NO: 121 - protein, 743 aa, Artificial Sequence
  Synthetic: MSA-IL2
EAHKSEIAHRYNDLGEQHFKGLVLIAFSQYLQKCSYDEHAKLVQEVTDFAKTCVADESAANCDKSLHTLFGDKLCAIPNLRENYGELADCCTKQEPERNECFLQHKDDNPSLPPFERPEAEAMCTSFKENPTTFMGHYLHEVARRHPYFYAPELLYYAEQYNEILTQCCAEADKESCLTPKLDGVKEKALVSSVRQRMKCSSMQKFGERAFKAWAVARLSQTFPNADFAEITKLATDLTKVNKECCHGDLLECADDRAELAKYMCENQATISSKLQTCCDKPLLKKAHCLSEVEHDTMPADLPAIAADFVEDQEVCKNYAEAKDVFLGTFLYEYSRRHPDYSVSLLLRLAKKYEATLEKCCAEANPPACYGTVLAEFQPLVEEPKNLVKTNCDLYEKLGEYGFQNAILVRYTQKAPQVSTPTLVEAARNLGRVGTKCCTLPEDQRLPCVEDYLSAILNRVCLLHEKTPVSEHVTKCCSGSLVERRPCFSALTVDETYVPKEFKAETFTFHSDICTLPEKEKQIKKQTALAELVKHKPKATAEQLKTVMDDFAQFLDTCCKAADKDTCFSTEGPNLVTRCKDALAGGGSAPTSSSTSSSTAEAQQQQQQQQQQQQHLEQLLMDLQELLSRMENYRNLKLPRMLTFKFYLPKQATELKDLQCLEDELGPLRHVLDLTQSKSFQLEDAENFISNIRVTVVKLKGSDNTFECQFDDESATVVDFLRRWIAFCQSIISTSPQHHHHHH

SEQ ID NO: 122 - protein, 1117 aa, Artificial Sequence
  Synthetic: IL12-MSA
MWELEKDVYVVEVDWTPDAPGETVNLTCDTPEEDDITWTSDQRHGVIGSGKTLTITVKEFLDAGQYTCHKGGETLSHSHLLLHKKENGIWSTEILKNFKNKTFLKCEAPNYSGRFTCSWLVQRNMDLKFNIKSSSSSPDSRAVTCGMASLSAEKVTLDQRDYEKYSVSCQEDVTCPTAEETLPIELALEARQQNKYENYSTSFFIRDIIKPDPPKNLQMKPLKNSQVEVSWEYPDSWSTPHSYFSLKFFVRIQRKKEKMKETEEGCNQKGAFLVEKTSTEVQCKGGNVCVQAQDRYYNSSCSKWACVPCRVRSGGSGGGSGGGSGGGSRVIPVSGPARCLSQSRNLLKTTDDMVKTAREKLKHYSCTAEDIDHEDITRDQTSTLKTCLPLELHKNESCLATRETSSTTRGSCLPPQKTSLMMTLCLGSIYEDLKMYQTEFQAINAALQNHNHQQIILDKGMLVAIDELMQSLNHNGETLRQKPPVGEADPYRVKMKLCILLHAFSTRVVTINRVMGYLSSAGSGGGSEAHKSEIAHRYNDLGEQHFKGLVLIAFSQYLQKCSYDEHAKLVQEVTDFAKTCVADESAANCDKSLHTLFGDKLCAIPNLRENYGELADCCTKQEPERNECFLQHKDDNPSLPPFERPEAEAMCTSFKENPTTFMGHYLHEVARRHPYFYAPELLYYAEQYNEILTQCCAEADKESCLTPKLDGVKEKALVSSVRQRMKCSSMQKFGERAFKAWAVARLSQTFPNADFAEITKLATDLTKVNKECCHGDLLECADDRAELAKYMCENQATISSKLQTCCDKPLLKKAHCLSEVEHDTMPADLPAIAADFVEDQEVCKNYAEAKDVFLGTFLYEYSRRHPDYSVSLLLRLAKKYEATLEKCCAEANPPACYGTVLAEFQPLVEEPKNLVKTNCDLYEKLGEYGFQNAILVRYTQKAPQVSTPTLVEAARNLGRVGTKCCTLPEDQRLPCVEDYLSAILNRVCLLHEKTPVSEHVTKCCSGSLVERRPCFSALTVDETYVPKEFKAETFTFHSDICTLPEKEKQIKKQTALAELVKHKPKATAEQLKTVMDDFAQFLDTCCKAADKDTCFSTEGPNLVTRCKDALAHHHHHH

SEQ ID NO: 123 - protein, 1445 aa, Artificial Sequence
  Synthetic: IL12-MSA-Lumican
MWELEKDVYVVEVDWTPDAPGETVNLTCDTPEEDDITWTSDQRHGVIGSGKTLTITVKEFLDAGQYTCHKGGETLSHSHLLLHKKENGIWSTEILKNFKNKTFLKCEAPNYSGRFTCSWLVQRNMDLKFNIKSSSSSPDSRAVTCGMASLSAEKVTLDQRDYEKYSVSCQEDVTCPTAEETLPIELALEARQQNKYENYSTSFFIRDIIKPDPPKNLQMKPLKNSQVEVSWEYPDSWSTPHSYFSLKFFVRIQRKKEKMKETEEGCNQKGAFLVEKTSTEVQCKGGNVCVQAQDRYYNSSCSKWACVPCRVRSGGSGGGSGGGSGGGSRVIPVSGPARCLSQSRNLLKTTDDMVKTAREKLKHYSCTAEDIDHEDITRDQTSTLKTCLPLELHKNESCLATRETSSTTRGSCLPPQKTSLMMTLCLGSIYEDLKMYQTEFQAINAALQNHNHQQIILDKGMLVAIDELMQSLNHNGETLRQKPPVGEADPYRVKMKLCILLHAFSTRVVTINRVMGYLSSAGSGGGSEAHKSEIAHRYNDLGEQHFKGLVLIAFSQYLQKCSYDEHAKLVQEVTDFAKTCVADESAANCDKSLHTLFGDKLCAIPNLRENYGELADCCTKQEPERNECFLQHKDDNPSLPPFERPEAEAMCTSFKENPTTFMGHYLHEVARRHPYFYAPELLYYAEQYNEILTQCCAEADKESCLTPKLDGVKEKALVSSVRQRMKCSSMQKFGERAFKAWAVARLSQTFPNADFAEITKLATDLTKVNKECCHGDLLECADDRAELAKYMCENQATISSKLQTCCDKPLLKKAHCLSEVEHDTMPADLPAIAADFVEDQEVCKNYAEAKDVFLGTFLYEYSRRHPDYSVSLLLRLAKKYEATLEKCCAEANPPACYGTVLAEFQPLVEEPKNLVKTNCDLYEKLGEYGFQNAILVRYTQKAPQVSTPTLVEAARNLGRVGTKCCTLPEDQRLPCVEDYLSAILNRVCLLHEKTPVSEHVTKCCSGSLVERRPCFSALTVDETYVPKEFKAETFTFHSDICTLPEKEKQIKKQTALAELVKHKPKATAEQLKTVMDDFAQFLDTCCKAADKDTCFSTEGPNLVTRCKDALAGGGSGGGSQYYDYDIPLFMYGQISPNCAPECNCPHSYPTAMYCDDLKLKSVPMVPPGIKYLYLRNNQIDHIDEKAFENVTDLQWLILDHNLLENSKIKGKVFSKLKQLKKLHINYNNLTESVGPLPKSLQDLQLTNNKISKLGSFDGLVNLTFIYLQHNQLKEDAVSASLKGLKSLEYLDLSFNQMSKLPAGLPTSLLTLYLDNNKISNIPDEYFKRFTGLQYLRLSHNELADSGVPGNSFNISSLLELDLSYNKLKSIPTVNENLENYYLEVNELEKFDVKSFCKILGPLSYSKIKHLRLDGNPLTQSSLPPDMYECLRVANEITVNHHHHHH

SEQ ID NO: 124 - protein, 330 aa, Artificial Sequence
  Synthetic: Lumican-GGGS-(H)6
QYYDYDIPLFMYGQISPNCAPECNCPHSYPTAMYCDDLKLKSVPMVPPGIKYLYLRNNQIDHIDEKAFENVTDLQWLILDHNLLENSKIKGKVFSKLKQLKKLHINYNNLTESVGPLPKSLQDLQLTNNKISKLGSFDGLVNLTFIYLQHNQLKEDAVSASLKGLKSLEYLDLSFNQMSKLPAGLPTSLLTLYLDNNKISNIPDEYFKRFTGLQYLRLSHNELADSGVPGNSFNISSLLELDLSYNKLKSIPTVNENLENYYLEVNELEKFDVKSFCKILGPLSYSKIKHLRLDGNPLTQSSLPPDMYECLRVANEITVNGGGSHHHHHH

SEQ ID NO: 125 - protein, 330 aa, Artificial Sequence
  Synthetic: Lumican D213A
QYYDYDIPLFMYGQISPNCAPECNCPHSYPTAMYCDDLKLKSVPMVPPGIKYLYLRNNQIDHIDEKAFENVTDLQWLILDHNLLENSKIKGKVFSKLKQLKKLHINYNNLTESVGPLPKSLQDLQLTNNKISKLGSFDGLVNLTFIYLQHNQLKEDAVSASLKGLKSLEYLDLSFNQMSKLPAGLPTSLLTLYLANNKISNIPDEYFKRFTGLQYLRLSHNELADSGVPGNSFNISSLLELDLSYNKLKSIPTVNENLENYYLEVNELEKFDVKSFCKILGPLSYSKIKHLRLDGNPLTQSSLPPDMYECLRVANEITVNGGGSHHHHHH

SEQ ID NO: 126 - protein, 918 aa, Artificial Sequence
  Synthetic: Lumican-MSA
QYYDYDIPLFMYGQISPNCAPECNCPHSYPTAMYCDDLKLKSVPMVPPGIKYLYLRNNQIDHIDEKAFENVTDLQWLILDHNLLENSKIKGKVFSKLKQLKKLHINYNNLTESVGPLPKSLQDLQLTNNKISKLGSFDGLVNLTFIYLQHNQLKEDAVSASLKGLKSLEYLDLSFNQMSKLPAGLPTSLLTLYLDNNKISNIPDEYFKRFTGLQYLRLSHNELADSGVPGNSFNISSLLELDLSYNKLKSIPTVNENLENYYLEVNELEKFDVKSFCKILGPLSYSKIKHLRLDGNPLTQSSLPPDMYECLRVANEITVNGGGSGGGSEAHKSEIAHRYNDLGEQHFKGLVLIAFSQYLQKCSYDEHAKLVQEVTDFAKTCVADESAANCDKSLHTLFGDKLCAIPNLRENYGELADCCTKQEPERNECFLQHKDDNPSLPPFERPEAEAMCTSFKENPTTFMGHYLHEVARRHPYFYAPELLYYAEQYNEILTQCCAEADKESCLTPKLDGVKEKALVSSVRQRMKCSSMQKFGERAFKAWAVARLSQTFPNADFAEITKLATDLTKVNKECCHGDLLECADDRAELAKYMCENQATISSKLQTCCDKPLLKKAHCLSEVEHDTMPADLPAIAADFVEDQEVCKNYAEAKDVFLGTFLYEYSRRHPDYSVSLLLRLAKKYEATLEKCCAEANPPACYGTVLAEFQPLVEEPKNLVKTNCDLYEKLGEYGFQNAILVRYTQKAPQVSTPTLVEAARNLGRVGTKCCTLPEDQRLPCVEDYLSAILNRVCLLHEKTPVSEHVTKCCSGSLVERRPCFSALTVDETYVPKEFKAETFTFHSDICTLPEKEKQIKKQTALAELVKHKPKATAEQLKTVMDDFAQFLDTCCKAADKDTCFSTEGPNLVTRCKDALAHHHHHH

SEQ ID NO: 127 - protein, 178 aa, Artificial Sequence
  Synthetic: Gluc
KPTENNEDFNIVAVASNFATTDLDADRGKLPGKKLPLEVLKEMEANARKAGCTRGCLICLSHIKCTPKMKKFIPGRCHTYEGDKESAQGGIGEAIVDIPEIPGFKDLEPMEQFIAQVDLCVDCTTGCLKGLANVQCSDLLKKWLPQRCATFASKIQGQVDKIKGAGGDGGGSHHHHHH

SEQ ID NO: 128 - protein, 510 aa, Artificial Sequence
  Synthetic: Lumican-Gluc
QYYDYDIPLFMYGQISPNCAPECNCPHSYPTAMYCDDLKLKSVPMVPPGIKYLYLRNNQIDHIDEKAFENVTDLQWLILDHNLLENSKIKGKVFSKLKQLKKLHINYNNLTESVGPLPKSLQDLQLTNNKISKLGSFDGLVNLTFIYLQHNQLKEDAVSASLKGLKSLEYLDLSFNQMSKLPAGLPTSLLTLYLDNNKISNIPDEYFKRFTGLQYLRLSHNELADSGVPGNSFNISSLLELDLSYNKLKSIPTVNENLENYYLEVNELEKFDVKSFCKILGPLSYSKIKHLRLDGNPLTQSSLPPDMYECLRVANEITVNGGGSGGGSGGGSKPTENNEDFNIVAVASNFATTDLDADRGKLPGKKLPLEVLKEMEANARKAGCTRGCLICLSHIKCTPKMKKFIPGRCHTYEGDKESAQGGIGEAIVDIPEIPGFKDLEPMEQFIAQVDLCVDCTTGCLKGLANVQCSDLLKKWLPQRCATFASKIQGQVDKIKGAGGDGGGSHHHHHH

SEQ ID NO: 129 - protein, 504 aa, Artificial Sequence
  Synthetic: CNA35-Gluc
ARDISSTNVTDLTVSPSKIEDGGKTTVKMTFDDKNGKIQNGDMIKVAWPTSGTVKIEGYSKTVPLTVKGEQVGQAVITPDGATITFNDKVEKLSDVSGFAEFEVQGRNLTQTNTSDDKVATITSGNKSTNVTVHKSEAGTSSVFYYKTGDMLPEDTTHVRWFLNINNEKSYVSKDITIKDQIQGGQQLDLSTLNINVTGTHSNYYSGQSAITDFEKAFPGSKITVDNTKNTIDVTIPQGYGSYNSFSINYKTKITNEQQKEFVNNSQAWYQEHGKEEVNGKSFNHTVHNINANAGIEGTVKGELKVLKQDKDTKGGGSGGGSGGGSKPTENNEDFNIVAVASNFATTDLDADRGKLPGKKLPLEVLKEMEANARKAGCTRGCLICLSHIKCTPKMKKFIPGRCHTYEGDKESAQGGIGEAIVDIPEIPGFKDLEPMEQFIAQVDLCVDCTTGCLKGLANVQCSDLLKKWLPQRCATFASKIQGQVDKIKGAGGDGGGSHHHHHH

SEQ ID NO: 130 - protein, 422 aa, Artificial Sequence
  Synthetic: ColG s3a/s3b-Gluc
PITKEMEPNDDIKEANGPIVEGVTVKGDLNGSDDADTFYFDVKEDGDVTIELPYSGSSNFTWLVYKEGDDQNHIASGIDKNNSKVGTFKSTKGRHYVFIYKHDSASNISYSLNIKGLGNEKLKEKENNDSSDKATVIPNFNTTMQGSLLGDDSRDYYSFEVKEEGEVNIELDKKDEFGVTWTLHPESNINDRITYGQVDGNKVSNKVKLRPGKYYLLVYKYSGSGNYELRVNGGGSGGGSGGGSKPTENNEDFNIVAVASNFATTDLDADRGKLPGKKLPLEVLKEMEANARKAGCTRGCLICLSHIKCTPKMKKFIPGRCHTYEGDKESAQGGIGEAIVDIPEIPGFKDLEPMEQFIAQVDLCVDCTTGCLKGLANVQCSDLLKKWLPQRCATFASKIQGQVDKIKGAGGDGGGSHHHHHH

SEQ ID NO: 131 - protein, 301 aa, Artificial Sequence
  Synthetic: ColH_s3-Gluc
GTEKEPNNSKETASGPIVPGIPVSGTIENTSDQDYFYFDVITPGEVKIDINKLGYGGATWVVYDENNNAVSYATDDGQNLSGKFKADKPGRYYIHLYMFNGSYMPYRINIEGGGSGGGSGGGSKPTENNEDFNIVAVASNFATTDLDADRGKLPGKKLPLEVLKEMEANARKAGCTRGCLICLSHIKCTPKMKKFIPGRCHTYEGDKESAQGGIGEAIVDIPEIPGFKDLEPMEQFIAQVDLCVDCTTGCLKGLANVQCSDLLKKWLPQRCATFASKIQGQVDKIKGAGGDGGGSHHHHHH

SEQ ID NO: 132 - protein, 212 aa, Artificial Sequence
  Synthetic: PLGF2 HBD-Gluc
RRRPKGRGKRRREKQRPTDSHLGGGSGGGSGGGSKPTENNEDFNIVAVASNFATTDLDADRGKLPGKKLPLEVLKEMEANARKAGCTRGCLICLSHIKCTPKMKKFIPGRCHTYEGDKESAQGGIGEAIVDIPEIPGFKDLEPMEQFIAQVDLCVDCTTGCLKGLANVQCSDLLKKWLPQRCATFASKIQGQVDKIKGAGGDGGGSHHHHHH

SEQ ID NO: 133 - protein, 1181 aa, Artificial Sequence
  Synthetic: 4M5.3-MSA-Lumican
ADVVMTQTPLSLPVSLGDQASISCRSSQSLVHSNGNTYLRWYLQKPGQSPKVLIYKVSNRVSGVPDRFSGSGSGTDFTLKINRVEAEDLGVYFCSQSTHVPWTFGGGTKLEIKSSADDAKKDAAKKDDAKKDDAKKDGGVKLDETGGGLVQPGGAMKLSCVTSGFTFGHYWMNWVRQSPEKGLEWVAQFRNKPYNYETYYSDSVKGRFTISRDDSKSSVYLQMNNLRVEDTGIYYCTGASYGMEYLGQGTSVTVSGGGSEAHKSEIAHRYNDLGEQHFKGLVLIAFSQYLQKCSYDEHAKLVQEVTDFAKTCVADESAANCDKSLHTLFGDKLCAIPNLRENYGELADCCTKQEPERNECFLQHKDDNPSLPPFERPEAEAMCTSFKENPTTFMGHYLHEVARRHPYFYAPELLYYAEQYNEILTQCCAEADKESCLTPKLDGVKEKALVSSVRQRMKCSSMQKFGERAFKAWAVARLSQTFPNADFAEITKLATDLTKVNKECCHGDLLECADDRAELAKYMCENQATISSKLQTCCDKPLLKKAHCLSEVEHDTMPADLPAIAADFVEDQEVCKNYAEAKDVFLGTFLYEYSRRHPDYSVSLLLRLAKKYEATLEKCCAEANPPACYGTVLAEFQPLVEEPKNLVKTNCDLYEKLGEYGFQNAILVRYTQKAPQVSTPTLVEAARNLGRVGTKCCTLPEDQRLPCVEDYLSAILNRVCLLHEKTPVSEHVTKCCSGSLVERRPCFSALTVDETYVPKEFKAETFTFHSDICTLPEKEKQIKKQTALAELVKHKPKATAEQLKTVMDDFAQFLDTCCKAADKDTCFSTEGPNLVTRCKDALAGGGSGGGSQYYDYDIPLFMYGQISPNCAPECNCPHSYPTAMYCDDLKLKSVPMVPPGIKYLYLRNNQIDHIDEKAFENVTDLQWLILDHNLLENSKIKGKVFSKLKQLKKLHINYNNLTESVGPLPKSLQDLQLTNNKISKLGSFDGLVNLTFIYLQHNQLKEDAVSASLKGLKSLEYLDLSFNQMSKLPAGLPTSLLTLYLDNNKISNIPDEYFKRFTGLQYLRLSHNELADSGVPGNSFNISSLLELDLSYNKLKSIPTVNENLENYYLEVNELEKFDVKSFCKILGPLSYSKIKHLRLDGNPLTQSSLPPDMYECLRVANEITVNGGGSHHHHHH

SEQ ID NO: 134 - protein, 989 aa, Artificial Sequence
  Synthetic: Ss07d-MSA-Lumican
ATVKFKYKGEEKQVDISKIYLVLRLGKFIYFYYDLGGGKLGLGHVSEKDAPKELLQMLEKQKKGGGSEAHKSEIAHRYNDLGEQHFKGLVLIAFSQYLQKCSYDEHAKLVQEVTDFAKTCVADESAANCDKSLHTLFGDKLCAIPNLRENYGELADCCTKQEPERNECFLQHKDDNPSLPPFERPEAEAMCTSFKENPTTFMGHYLHEVARRHPYFYAPELLYYAEQYNEILTQCCAEADKESCLTPKLDGVKEKALVSSVRQRMKCSSMQKFGERAFKAWAVARLSQTFPNADFAEITKLATDLTKVNKECCHGDLLECADDRAELAKYMCENQATISSKLQTCCDKPLLKKAHCLSEVEHDTMPADLPAIAADFVEDQEVCKNYAEAKDVFLGTFLYEYSRRHPDYSVSLLLRLAKKYEATLEKCCAEANPPACYGTVLAEFQPLVEEPKNLVKTNCDLYEKLGEYGFQNAILVRYTQKAPQVSTPTLVEAARNLGRVGTKCCTLPEDQRLPCVEDYLSAILNRVCLLHEKTPVSEHVTKCCSGSLVERRPCFSALTVDETYVPKEFKAETFTFHSDICTLPEKEKQIKKQTALAELVKHKPKATAEQLKTVMDDFAQFLDTCCKAADKDTCFSTEGPNLVTRCKDALAGGGSGGGSQYYDYDIPLFMYGQISPNCAPECNCPHSYPTAMYCDDLKLKSVPMVPPGIKYLYLRNNQIDHIDEKAFENVTDLQWLILDHNLLENSKIKGKVFSKLKQLKKLHINYNNLTESVGPLPKSLQDLQLTNNKISKLGSFDGLVNLTFIYLQHNQLKEDAVSASLKGLKSLEYLDLSFNQMSKLPAGLPTSLLTLYLDNNKISNIPDEYFKRFTGLQYLRLSHNELADSGVPGNSFNISSLLELDLSYNKLKSIPTVNENLENYYLEVNELEKFDVKSFCKILGPLSYSKIKHLRLDGNPLTQSSLPPDMYECLRVANEITVNGGGSHHHHHH

SEQ ID NO: 135 - protein, 1063 aa, Artificial Sequence
  Synthetic: ZZ-MSA Lumican
MRVPAQLLGLLLLWLPGARCAVDNKFNKEQQNAFYEILHLPNLNEEQRNAFIQSLKDDPSQSANLLAEAKKLNDAQAPKVDNKFNKEQQNAFYEILHLPNLNEEQRNAFIQSLKDDPSQSANLLAEAKKLNDAQAPKGGGSEAHKSEIAHRYNDLGEQHFKGLVLIAFSQYLQKCSYDEHAKLVQEVTDFAKTCVADESAANCDKSLHTLFGDKLCAIPNLRENYGELADCCTKQEPERNECFLQHKDDNPSLPPFERPEAEAMCTSFKENPTTFMGHYLHEVARRHPYFYAPELLYYAEQYNEILTQCCAEADKESCLTPKLDGVKEKALVSSVRQRMKCSSMQKFGERAFKAWAVARLSQTFPNADFAEITKLATDLTKVNKECCHGDLLECADDRAELAKYMCENQATISSKLQTCCDKPLLKKAHCLSEVEHDTMPADLPAIAADFVEDQEVCKNYAEAKDVFLGTFLYEYSRRHPDYSVSLLLRLAKKYEATLEKCCAEANPPACYGTVLAEFQPLVEEPKNLVKTNCDLYEKLGEYGFQNAILVRYTQKAPQVSTPTLVEAARNLGRVGTKCCTLPEDQRLPCVEDYLSAILNRVCLLHEKTPVSEHVTKCCSGSLVERRPCFSALTVDETYVPKEFKAETFTFHSDICTLPEKEKQIKKQTALAELVKHKPKATAEQLKTVMDDFAQFLDTCCKAADKDTCFSTEGPNLVTRCKDALAGGGSGGGSQYYDYDIPLFMYGQISPNCAPECNCPHSYPTAMYCDDLKLKSVPMVPPGIKYLYLRNNQIDHIDEKAFENVTDLQWLILDHNLLENSKIKGKVFSKLKQLKKLHINYNNLTESVGPLPKSLQDLQLTNNKISKLGSFDGLVNLTFIYLQHNQLKEDAVSASLKGLKSLEYLDLSFNQMSKLPAGLPTSLLTLYLDNNKISNIPDEYFKRFTGLQYLRLSHNELADSGVPGNSFNISSLLELDLSYNKLKSIPTVNENLENYYLEVNELEKFDVKSFCKILGPLSYSKIKHLRLDGNPLTQSSLPPDMYECLRVANEITVNGGGSHHHHHH

SEQ ID NO: 136 - protein, 937 aa, Artificial Sequence
  Synthetic: Lumican-MSA-FcIII4C
QYYDYDIPLFMYGQISPNCAPECNCPHSYPTAMYCDDLKLKSVPMVPPGIKYLYLRNNQIDHIDEKAFENVTDLQWLILDHNLLENSKIKGKVFSKLKQLKKLHINYNNLTESVGPLPKSLQDLQLTNNKISKLGSFDGLVNLTFIYLQHNQLKEDAVSASLKGLKSLEYLDLSFNQMSKLPAGLPTSLLTLYLDNNKISNIPDEYFKRFTGLQYLRLSHNELADSGVPGNSFNISSLLELDLSYNKLKSIPTVNENLENYYLEVNELEKFDVKSFCKILGPLSYSKIKHLRLDGNPLTQSSLPPDMYECLRVANEITVNGGGSGGGSEAHKSEIAHRYNDLGEQHFKGLVLIAFSQYLQKCSYDEHAKLVQEVTDFAKTCVADESAANCDKSLHTLFGDKLCAIPNLRENYGELADCCTKQEPERNECFLQHKDDNPSLPPFERPEAEAMCTSFKENPTTFMGHYLHEVARRHPYFYAPELLYYAEQYNEILTQCCAEADKESCLTPKLDGVKEKALVSSVRQRMKCSSMQKFGERAFKAWAVARLSQTFPNADFAEITKLATDLTKVNKECCHGDLLECADDRAELAKYMCENQATISSKLQTCCDKPLLKKAHCLSEVEHDTMPADLPAIAADFVEDQEVCKNYAEAKDVFLGTFLYEYSRRHPDYSVSLLLRLAKKYEATLEKCCAEANPPACYGTVLAEFQPLVEEPKNLVKTNCDLYEKLGEYGFQNAILVRYTQKAPQVSTPTLVEAARNLGRVGTKCCTLPEDQRLPCVEDYLSAILNRVCLLHEKTPVSEHVTKCCSGSLVERRPCFSALTVDETYVPKEFKAETFTFHSDICTLPEKEKQIKKQTALAELVKHKPKATAEQLKTVMDDFAQFLDTCCKAADKDTCFSTEGPNLVTRCKDALAGGGSCDCAWHLGELVWCTCHHHHHH

SEQ ID NO: 137 - protein, 1012 aa, Artificial Sequence
  Synthetic: Lumican-MSA-Fn3
QYYDYDIPLFMYGQISPNCAPECNCPHSYPTAMYCDDLKLKSVPMVPPGIKYLYLRNNQIDHIDEKAFENVTDLQWLILDHNLLENSKIKGKVFSKLKQLKKLHINYNNLTESVGPLPKSLQDLQLTNNKISKLGSFDGLVNLTFIYLQHNQLKEDAVSASLKGLKSLEYLDLSFNQMSKLPAGLPTSLLTLYLDNNKISNIPDEYFKRFTGLQYLRLSHNELADSGVPGNSFNISSLLELDLSYNKLKSIPTVNENLENYYLEVNELEKFDVKSFCKILGPLSYSKIKHLRLDGNPLTQSSLPPDMYECLRVANEITVNGGGSGGGSEAHKSEIAHRYNDLGEQHFKGLVLIAFSQYLQKCSYDEHAKLVQEVTDFAKTCVADESAANCDKSLHTLFGDKLCAIPNLRENYGELADCCTKQEPERNECFLQHKDDNPSLPPFERPEAEAMCTSFKENPTTFMGHYLHEVARRHPYFYAPELLYYAEQYNEILTQCCAEADKESCLTPKLDGVKEKALVSSVRQRMKCSSMQKFGERAFKAWAVARLSQTFPNADFAEITKLATDLTKVNKECCHGDLLECADDRAELAKYMCENQATISSKLQTCCDKPLLKKAHCLSEVEHDTMPADLPAIAADFVEDQEVCKNYAEAKDVFLGTFLYEYSRRHPDYSVSLLLRLAKKYEATLEKCCAEANPPACYGTVLAEFQPLVEEPKNLVKTNCDLYEKLGEYGFQNAILVRYTQKAPQVSTPTLVEAARNLGRVGTKCCTLPEDQRLPCVEDYLSAILNRVCLLHEKTPVSEHVTKCCSGSLVERRPCFSALTVDETYVPKEFKAETFTFHSDICTLPEKEKQIKKQTALAELVKHKPKATAEQLKTVMDDFAQFLDTCCKAADKDTCFSTEGPNLVTRCKDALAGGGSVSDVPRDLEVVAATPTSLLISWCCSDNCSNSYRITYGETGGNSPVQEFTVPRSCFMATISGLKPGVDYTITAYAVTDSNGPHPISINYRTHHHHHH

SEQ ID NO: 138 - protein, 1047 aa, Artificial Sequence
  Synthetic: Lumican-MSA-SpG2
QYYDYDIPLFMYGQISPNCAPECNCPHSYPTAMYCDDLKLKSVPMVPPGIKYLYLRNNQIDHIDEKAFENVTDLQWLILDHNLLENSKIKGKVFSKLKQLKKLHINYNNLTESVGPLPKSLQDLQLTNNKISKLGSFDGLVNLTFIYLQHNQLKEDAVSASLKGLKSLEYLDLSFNQMSKLPAGLPTSLLTLYLDNNKISNIPDEYFKRFTGLQYLRLSHNELADSGVPGNSFNISSLLELDLSYNKLKSIPTVNENLENYYLEVNELEKFDVKSFCKILGPLSYSKIKHLRLDGNPLTQSSLPPDMYECLRVANEITVNGGGSGGGSEAHKSEIAHRYNDLGEQHFKGLVLIAFSQYLQKCSYDEHAKLVQEVTDFAKTCVADESAANCDKSLHTLFGDKLCAIPNLRENYGELADCCTKQEPERNECFLQHKDDNPSLPPFERPEAEAMCTSFKENPTTFMGHYLHEVARRHPYFYAPELLYYAEQYNEILTQCCAEADKESCLTPKLDGVKEKALVSSVRQRMKCSSMQKFGERAFKAWAVARLSQTFPNADFAEITKLATDLTKVNKECCHGDLLECADDRAELAKYMCENQATISSKLQTCCDKPLLKKAHCLSEVEHDTMPADLPAIAADFVEDQEVCKNYAEAKDVFLGTFLYEYSRRHPDYSVSLLLRLAKKYEATLEKCCAEANPPACYGTVLAEFQPLVEEPKNLVKTNCDLYEKLGEYGFQNAILVRYTQKAPQVSTPTLVEAARNLGRVGTKCCTLPEDQRLPCVEDYLSAILNRVCLLHEKTPVSEHVTKCCSGSLVERRPCFSALTVDETYVPKEFKAETFTFHSDICTLPEKEKQIKKQTALAELVKHKPKATAEQLKTVMDDFAQFLDTCCKAADKDTCFSTEGPNLVTRCKDALAGGGSTYKLVINGKTLKGETTTEAVDAATAEKVFKQYANDYGVDGEWTYDDATKTFTVTEKPEVIDASELTPAVTTYKLVINGKTLKGETTTKAVDAETAEKAFKQYANDYGVDGVWTYDDATKTFTVTEHHHHHH

SEQ ID NO: 139 - protein, 926 aa, Artificial Sequence
  Synthetic: Lumican-MSA-RRGW
QYYDYDIPLFMYGQISPNCAPECNCPHSYPTAMYCDDLKLKSVPMVPPGIKYLYLRNNQIDHIDEKAFENVTDLQWLILDHNLLENSKIKGKVFSKLKQLKKLHINYNNLTESVGPLPKSLQDLQLTNNKISKLGSFDGLVNLTFIYLQHNQLKEDAVSASLKGLKSLEYLDLSFNQMSKLPAGLPTSLLTLYLDNNKISNIPDEYFKRFTGLQYLRLSHNELADSGVPGNSFNISSLLELDLSYNKLKSIPTVNENLENYYLEVNELEKFDVKSFCKILGPLSYSKIKHLRLDGNPLTQSSLPPDMYECLRVANEITVNGGGSGGGSEAHKSEIAHRYNDLGEQHFKGLVLIAFSQYLQKCSYDEHAKLVQEVTDFAKTCVADESAANCDKSLHTLFGDKLCAIPNLRENYGELADCCTKQEPERNECFLQHKDDNPSLPPFERPEAEAMCTSFKENPTTFMGHYLHEVARRHPYFYAPELLYYAEQYNEILTQCCAEADKESCLTPKLDGVKEKALVSSVRQRMKCSSMQKFGERAFKAWAVARLSQTFPNADFAEITKLATDLTKVNKECCHGDLLECADDRAELAKYMCENQATISSKLQTCCDKPLLKKAHCLSEVEHDTMPADLPAIAADFVEDQEVCKNYAEAKDVFLGTFLYEYSRRHPDYSVSLLLRLAKKYEATLEKCCAEANPPACYGTVLAEFQPLVEEPKNLVKTNCDLYEKLGEYGFQNAILVRYTQKAPQVSTPTLVEAARNLGRVGTKCCTLPEDQRLPCVEDYLSAILNRVCLLHEKTPVSEHVTKCCSGSLVERRPCFSALTVDETYVPKEFKAETFTFHSDICTLPEKEKQIKKQTALAELVKHKPKATAEQLKTVMDDFAQFLDTCCKAADKDTCFSTEGPNLVTRCKDALAGGGSRRGWHHHHHH

SEQ ID NO: 140 - protein, 926 aa, Artificial Sequence
  Synthetic: Lumican-MSA-WGRR
QYYDYDIPLFMYGQISPNCAPECNCPHSYPTAMYCDDLKLKSVPMVPPGIKYLYLRNNQIDHIDEKAFENVTDLQWLILDHNLLENSKIKGKVFSKLKQLKKLHINYNNLTESVGPLPKSLQDLQLTNNKISKLGSFDGLVNLTFIYLQHNQLKEDAVSASLKGLKSLEYLDLSFNQMSKLPAGLPTSLLTLYLDNNKISNIPDEYFKRFTGLQYLRLSHNELADSGVPGNSFNISSLLELDLSYNKLKSIPTVNENLENYYLEVNELEKFDVKSFCKILGPLSYSKIKHLRLDGNPLTQSSLPPDMYECLRVANEITVNGGGSGGGSEAHKSEIAHRYNDLGEQHFKGLVLIAFSQYLQKCSYDEHAKLVQEVTDFAKTCVADESAANCDKSLHTLFGDKLCAIPNLRENYGELADCCTKQEPERNECFLQHKDDNPSLPPFERPEAEAMCTSFKENPTTFMGHYLHEVARRHPYFYAPELLYYAEQYNEILTQCCAEADKESCLTPKLDGVKEKALVSSVRQRMKCSSMQKFGERAFKAWAVARLSQTFPNADFAEITKLATDLTKVNKECCHGDLLECADDRAELAKYMCENQATISSKLQTCCDKPLLKKAHCLSEVEHDTMPADLPAIAADFVEDQEVCKNYAEAKDVFLGTFLYEYSRRHPDYSVSLLLRLAKKYEATLEKCCAEANPPACYGTVLAEFQPLVEEPKNLVKTNCDLYEKLGEYGFQNAILVRYTQKAPQVSTPTLVEAARNLGRVGTKCCTLPEDQRLPCVEDYLSAILNRVCLLHEKTPVSEHVTKCCSGSLVERRPCFSALTVDETYVPKEFKAETFTFHSDICTLPEKEKQIKKQTALAELVKHKPKATAEQLKTVMDDFAQFLDTCCKAADKDTCFSTEGPNLVTRCKDALAGGGSWGRRHHHHHH

SEQ ID NO: 141 - protein, 219 aa, Artificial Sequence
  Synthetic: 4420 LC  murine kappa chain
DVVMTQTPLSLPVSLGDQASISCRSSQSLVHSNGNTYLRWYLQKPGQSPKVLIYKVSNRFSGVPDRFSGSGSGTDFTLKISRVEAEDLGVYFCSQSTHVPWTFGGGTKLEIKRADAAPTVSIFPPSSEQLTSGGASVVCFLNNFYPKDINVKWKIDGSERQNGVLNSWTDQDSKDSTYSMSSTLTLTKDEYERHNSYTCEATHKTSTSPIVKSFNRNEC

SEQ ID NO: 142 - protein, 787 aa, Artificial Sequence
  Synthetic: 4220 HC-Lumican (LALA-PG)
DVKLDETGGGLVQPGRPMKLSCVASGFTFSDYWMNWVRQSPEKGLEWVAQIRNKPYNYETYYSDSVKGRFTISRDDSKSSVYLQMNNLRVEDMGIYYCTGSYYGMDYWGQGTSVTVSAKTTAPSVYPLAPVCGGTTGSSVTLGCLVKGYFPEPVTLTWNSGSLSSGVHTFPALLQSGLYTLSSSVTVTSNTWPSQTITCNVAHPASSTKVDKKIEPRVPITQNPCPPLKECPPCAAPDAAGGPSVFIFPPKIKDVLMISLSPMVTCVVVDVSEDDPDVQISWFVNNVEVHTAQTQTHREDYNSTLRVVSALPIQHQDWMSGKEFKCKVNNRALGSPIEKTISKPRGPVRAPQVYVLPPPAEEMTKKEFSLTCMITGFLPAEIAVDWTSNGRTEQNYKNTATVLDSDGSYFMYSKLRVQKSTWERGSLFACSVVHEGLHNHLTTKTISRSLGKGGGGSGGGGSGGGGSQYYDYDIPLFMYGQISPNCAPECNCPHSYPTAMYCDDLKLKSVPMVPPGIKYLYLRNNQIDHIDEKAFENVTDLQWLILDHNLLENSKIKGKVFSKLKQLKKLHINYNNLTESVGPLPKSLQDLQLTNNKISKLGSFDGLVNLTFIYLQHNQLKEDAVSASLKGLKSLEYLDLSFNQMSKLPAGLPTSLLTLYLDNNKISNIPDEYFKRFTGLQYLRLSHNELADSGVPGNSFNISSLLELDLSYNKLKSIPTVNENLENYYLEVNELEKFDVKSFCKILGPLSYSKIKHLRLDGNPLTQSSLPPDMYECLRVANEITVN

SEQ ID NO: 143 - protein, 452 aa, Artificial Sequence
  Synthetic: 4220 HC  mIgG2c
DVKLDETGGGLVQPGRPMKLSCVASGFTFSDYWMNWVRQSPEKGLEWVAQIRNKPYNYETYYSDSVKGRFTISRDDSKSSVYLQMNNLRVEDMGIYYCTGSYYGMDYWGQGTSVTVSAKTTAPSVYPLAPVCGGTTGSSVTLGCLVKGYFPEPVTLTWNSGSLSSGVHTFPALLQSGLYTLSSSVTVTSNTWPSQTITCNVAHPASSTKVDKKIEPRVPITQNPCPPLKECPPCAAPDAAGGPSVFIFPPKIKDVLMISLSPMVTCVVVDVSEDDPDVQISWFVNNVEVHTAQTQTHREDYNSTLRVVSALPIQHQDWMSGKEFKCKVNNRALGSPIEKTISKPRGPVRAPQVYVLPPPAEEMTKKEFSLTCMITGFLPAEIAVDWTSNGRTEQNYKNTATVLDSDGSYFMYSKLRVQKSTWERGSLFACSVVHEGLHNHLTTKTISRSLGK

SEQ ID NO: 144 - protein, 233 aa, Artificial Sequence
  Synthetic: 3/23 LC  murine kappa
METDTLLLWVLLLWVPGSTGDTVLTQSPALAVSPGERVTISCRASESVSTRMHWYQQRPGQPPKLLIYVASRLESGVPARFSGGGSGTDFTLTIDPVEANDTATYFCQQSWNDPWTFGGGTKLELKRADAAPTVSIFPPSSEQLTSGGASVVCFLNNFYPKDINVKWKIDGSERQNGVLNSWTDQDSKDSTYSMSSTLTLTKDEYERHNSYTCEATHKTSTSPIVKSFNRNEC

SEQ ID NO: 145 - protein, 805 aa, Artificial Sequence
  Synthetic: 3/23 HC-lumican
MDIWLSLVFLVLFIKGVQCEVQLVESGGGLVQPGRSLKLSCAASGFTLSDYYMAWVRQAPKKGLEWVASINYEGSSTYYGESVKGRFTISRDNAKSTLYLQMNSLRSEDTATYYCVRHDNYFDYWGQGVLVTVSSAKTTAPSVYPLAPVCGGTTGSSVTLGCLVKGYFPEPVTLTWNSGSLSSGVHTFPALLQSGLYTLSSSVTVTSNTWPSQTITCNVAHPASSTKVDKKIEPRVPITQNPCPPLKECPPCAAPDAAGGPSVFIFPPKIKDVLMISLSPMVTCVVVDVSEDDPDVQISWFVNNVEVHTAQTQTHREDYNSTLRVVSALPIQHQDWMSGKEFKCKVNNRALGSPIEKTISKPRGPVRAPQVYVLPPPAEEMTKKEFSLTCMITGFLPAEIAVDWTSNGRTEQNYKNTATVLDSDGSYFMYSKLRVQKSTWERGSLFACSVVHEGLHNHLTTKTISRSLGKGGGGSGGGGSGGGGSQYYDYDIPLFMYGQISPNCAPECNCPHSYPTAMYCDDLKLKSVPMVPPGIKYLYLRNNQIDHIDEKAFENVTDLQWLILDHNLLENSKIKGKVFSKLKQLKKLHINYNNLTESVGPLPKSLQDLQLTNNKISKLGSFDGLVNLTFIYLQHNQLKEDAVSASLKGLKSLEYLDLSFNQMSKLPAGLPTSLLTLYLDNNKISNIPDEYFKRFTGLQYLRLSHNELADSGVPGNSFNISSLLELDLSYNKLKSIPTVNENLENYYLEVNELEKFDVKSFCKILGPLSYSKIKHLRLDGNPLTQSSLPPDMYECLRVANEITVN

SEQ ID NO: 146 - protein, 214 aa, Artificial Sequence
  Synthetic: LOB12.3 LC  murine kappa
DIQMTQSPASLSASLEEIVTITCQASQDIGNWLAWYHQKPGKSPQLLIYGSTSLADGVPSRFSGSSSGSQYSLKISRLQVEDIGIYYCLQAYGAPWTFGGGTKLELKRADAAPTVSIFPPSSEQLTSGGASVVCFLNNFYPKDINVKWKIDGSERQNGVLNSWTDQDSKDSTYSMSSTLTLTKDEYERHNSYTCEATHKTSTSPIVKSFNRNEC

SEQ ID NO: 147 - protein, 790 aa, Artificial Sequence
  Synthetic: LOB12.3 HC- Lumican
DVQLVESGGGLVQPGRSLKLSCAASGFIFSYFDMAWVRQAPTKGLEWVASISPDGSIPYYRDSVKGRFTVSRENAKSSLYLQMDSLRSEDTATYYCARRSYGGYSEIDYWGQGVMVTVSSAKTTAPSVYPLAPVCGGTTGSSVTLGCLVKGYFPEPVTLTWNSGSLSSGVHTFPALLQSGLYTLSSSVTVTSNTWPSQTITCNVAHPASSTKVDKKIEPRVPITQNPCPPLKECPPCAAPDAAGGPSVFIFPPKIKDVLMISLSPMVTCVVVDVSEDDPDVQISWFVNNVEVHTAQTQTHREDYNSTLRVVSALPIQHQDWMSGKEFKCKVNNRALGSPIEKTISKPRGPVRAPQVYVLPPPAEEMTKKEFSLTCMITGFLPAEIAVDWTSNGRTEQNYKNTATVLDSDGSYFMYSKLRVQKSTWERGSLFACSVVHEGLHNHLTTKTISRSLGKGGGGSGGGGSGGGGSQYYDYDIPLFMYGQISPNCAPECNCPHSYPTAMYCDDLKLKSVPMVPPGIKYLYLRNNQIDHIDEKAFENVTDLQWLILDHNLLENSKIKGKVFSKLKQLKKLHINYNNLTESVGPLPKSLQDLQLTNNKISKLGSFDGLVNLTFIYLQHNQLKEDAVSASLKGLKSLEYLDLSFNQMSKLPAGLPTSLLTLYLDNNKISNIPDEYFKRFTGLQYLRLSHNELADSGVPGNSFNISSLLELDLSYNKLKSIPTVNENLENYYLEVNELEKFDVKSFCKILGPLSYSKIKHLRLDGNPLTQSSLPPDMYECLRVANEITVN

SEQ ID NO: 148 - protein, 219 aa, Artificial Sequence
  Synthetic: OX86 LC  murine kappa
DIVMTQGALPNPVPSGESASITCRSSQSLVYKDGQTYLNWFLQRPGQSPQLLTYWMSTRASGVSDRFSGSGSGTYFTLKISRVRAEDAGVYYCQQVREYPFTFGSGTKLEIKRADAAPTVSIFPPSSEQLTSGGASVVCFLNNFYPKDINVKWKIDGSERQNGVLNSWTDQDSKDSTYSMSSTLTLTKDEYERHNSYTCEATHKTSTSPIVKSFNRNEC

SEQ ID NO: 149 - protein, 787 aa, Artificial Sequence
  Synthetic: OX86 HC-Lumican
QVQLKESGPGLVQPSQTLSLTCTVSGFSLTGYNLHWVRQPPGKGLEWMGRMRYDGDTYYNSVLKSRLSISRDTSKNQVFLKMNSLQTDDTAIYYCTRDGRGDSFDYWGQGVMVTVSSAKTTAPSVYPLAPVCGGTTGSSVTLGCLVKGYFPEPVTLTWNSGSLSSGVHTFPALLQSGLYTLSSSVTVTSNTWPSQTITCNVAHPASSTKVDKKIEPRVPITQNPCPPLKECPPCAAPDAAGGPSVFIFPPKIKDVLMISLSPMVTCVVVDVSEDDPDVQISWFVNNVEVHTAQTQTHREDYNSTLRVVSALPIQHQDWMSGKEFKCKVNNRALGSPIEKTISKPRGPVRAPQVYVLPPPAEEMTKKEFSLTCMITGFLPAEIAVDWTSNGRTEQNYKNTATVLDSDGSYFMYSKLRVQKSTWERGSLFACSVVHEGLHNHLTTKTISRSLGKGGGGSGGGGSGGGGSQYYDYDIPLFMYGQISPNCAPECNCPHSYPTAMYCDDLKLKSVPMVPPGIKYLYLRNNQIDHIDEKAFENVTDLQWLILDHNLLENSKIKGKVFSKLKQLKKLHINYNNLTESVGPLPKSLQDLQLTNNKISKLGSFDGLVNLTFIYLQHNQLKEDAVSASLKGLKSLEYLDLSFNQMSKLPAGLPTSLLTLYLDNNKISNIPDEYFKRFTGLQYLRLSHNELADSGVPGNSFNISSLLELDLSYNKLKSIPTVNENLENYYLEVNELEKFDVKSFCKILGPLSYSKIKHLRLDGNPLTQSSLPPDMYECLRVANEITVN

SEQ ID NO: 150 - protein, 215 aa, Artificial Sequence
  Synthetic: 2C11 LC  murine kappa
DIQMTQSPSSLPASLGDRVTINCQASQDISNYLNWYQQKPGKAPKLLIYYTNKLADGVPSRFSGSGSGRDSSFTISSLESEDIGSYYCQQYYNYPWTFGPGTKLEIKRRADAAPTVSIFPPSSEQLTSGGASVVCFLNNFYPKDINVKWKIDGSERQNGVLNSWTDQDSKDSTYSMSSTLTLTKDEYERHNSYTCEATHKTSTSPIVKSFNRNEC

SEQ ID NO: 151 - protein, 786 aa, Artificial Sequence
  Synthetic: 2C11 HC- lumican
EVQLVESGGGLVQPGKSLKLSCEASGFTFSGYGMHWVRQAPGRGLESVAYITSSSINIKYADAVKGRFTVSRDNAKNLLFLQMNILKSEDTAMYYCARFDWDKNYWGQGTMVTVSSAKTTAPSVYPLAPVCGGTTGSSVTLGCLVKGYFPEPVTLTWNSGSLSSGVHTFPALLQSGLYTLSSSVTVTSNTWPSQTITCNVAHPASSTKVDKKIEPRVPITQNPCPPLKECPPCAAPDAAGGPSVFIFPPKIKDVLMISLSPMVTCVVVDVSEDDPDVQISWFVNNVEVHTAQTQTHREDYNSTLRVVSALPIQHQDWMSGKEFKCKVNNRALGSPIEKTISKPRGPVRAPQVYVLPPPAEEMTKKEFSLTCMITGFLPAEIAVDWTSNGRTEQNYKNTATVLDSDGSYFMYSKLRVQKSTWERGSLFACSVVHEGLHNHLTTKTISRSLGKGGGGSGGGGSGGGGSQYYDYDIPLFMYGQISPNCAPECNCPHSYPTAMYCDDLKLKSVPMVPPGIKYLYLRNNQIDHIDEKAFENVTDLQWLILDHNLLENSKIKGKVFSKLKQLKKLHINYNNLTESVGPLPKSLQDLQLTNNKISKLGSFDGLVNLTFIYLQHNQLKEDAVSASLKGLKSLEYLDLSFNQMSKLPAGLPTSLLTLYLDNNKISNIPDEYFKRFTGLQYLRLSHNELADSGVPGNSFNISSLLELDLSYNKLKSIPTVNENLENYYLEVNELEKFDVKSFCKILGPLSYSKIKHLRLDGNPLTQSSLPPDMYECLRVANEITVN

SEQ ID NO: 152 - protein, 25 aa, Artificial Sequence
  Synthetic: T2A peptide (furin cleavage site  GSG  T2A)
RRKRGSGEGRGSLLTCGDVEENPGP

SEQ ID NO: 153 - protein, 411 aa, Artificial Sequence
  Synthetic: CCL3- Lumican
APYGADTPTACCFSYSRKIPRQFIVDYFETSSLCSQPGVIFLTKRNRQICADSKETWVQEYITDLELNAGGGSGGGSGGGSQYYDYDIPLFMYGQISPNCAPECNCPHSYPTAMYCDDLKLKSVPMVPPGIKYLYLRNNQIDHIDEKAFENVTDLQWLILDHNLLENSKIKGKVFSKLKQLKKLHINYNNLTESVGPLPKSLQDLQLTNNKISKLGSFDGLVNLTFIYLQHNQLKEDAVSASLKGLKSLEYLDLSFNQMSKLPAGLPTSLLTLYLDNNKISNIPDEYFKRFTGLQYLRLSHNELADSGVPGNSFNISSLLELDLSYNKLKSIPTVNENLENYYLEVNELEKFDVKSFCKILGPLSYSKIKHLRLDGNPLTQSSLPPDMYECLRVANEITVNGGGSHHHHHH

SEQ ID NO: 154 - protein, 411 aa, Artificial Sequence
  Synthetic: Lumican  CCL3
QYYDYDIPLFMYGQISPNCAPECNCPHSYPTAMYCDDLKLKSVPMVPPGIKYLYLRNNQIDHIDEKAFENVTDLQWLILDHNLLENSKIKGKVFSKLKQLKKLHINYNNLTESVGPLPKSLQDLQLTNNKISKLGSFDGLVNLTFIYLQHNQLKEDAVSASLKGLKSLEYLDLSFNQMSKLPAGLPTSLLTLYLDNNKISNIPDEYFKRFTGLQYLRLSHNELADSGVPGNSFNISSLLELDLSYNKLKSIPTVNENLENYYLEVNELEKFDVKSFCKILGPLSYSKIKHLRLDGNPLTQSSLPPDMYECLRVANEITVNGGGSGGGSGGGSAPYGADTPTACCFSYSRKIPRQFIVDYFETSSLCSQPGVIFLTKRNRQICADSKETWVQEYITDLELNAGGGSHHHHHH

SEQ ID NO: 155 - protein, 79 aa, Artificial Sequence
  Synthetic: CCL3
APYGADTPTACCFSYSRKIPRQFIVDYFETSSLCSQPGVIFLTKRNRQICADSKETWVQEYITDLELNAGGGSHHHHHH

SEQ ID NO: 156 - protein, 411 aa, Artificial Sequence
  Synthetic: CCL4- lumican
APMGSDPPTSCCFSYTSRQLHRSFVMDYYETSSLCSKPAVVFLTKRGRQICANPSEPWVTEYMSDLELNGGGSGGGSGGGSQYYDYDIPLFMYGQISPNCAPECNCPHSYPTAMYCDDLKLKSVPMVPPGIKYLYLRNNQIDHIDEKAFENVTDLQWLILDHNLLENSKIKGKVFSKLKQLKKLHINYNNLTESVGPLPKSLQDLQLTNNKISKLGSFDGLVNLTFIYLQHNQLKEDAVSASLKGLKSLEYLDLSFNQMSKLPAGLPTSLLTLYLDNNKISNIPDEYFKRFTGLQYLRLSHNELADSGVPGNSFNISSLLELDLSYNKLKSIPTVNENLENYYLEVNELEKFDVKSFCKILGPLSYSKIKHLRLDGNPLTQSSLPPDMYECLRVANEITVNGGGSHHHHHH

SEQ ID NO: 157 - protein, 411 aa, Artificial Sequence
  Synthetic: Lumican  CCL4
QYYDYDIPLFMYGQISPNCAPECNCPHSYPTAMYCDDLKLKSVPMVPPGIKYLYLRNNQIDHIDEKAFENVTDLQWLILDHNLLENSKIKGKVFSKLKQLKKLHINYNNLTESVGPLPKSLQDLQLTNNKISKLGSFDGLVNLTFIYLQHNQLKEDAVSASLKGLKSLEYLDLSFNQMSKLPAGLPTSLLTLYLDNNKISNIPDEYFKRFTGLQYLRLSHNELADSGVPGNSFNISSLLELDLSYNKLKSIPTVNENLENYYLEVNELEKFDVKSFCKILGPLSYSKIKHLRLDGNPLTQSSLPPDMYECLRVANEITVNGGGSGGGSGGGSAPMGSDPPTSCCFSYTSRQLHRSFVMDYYETSSLCSKPAVVFLTKRGRQICANPSEPWVTEYMSDLELNGGGSHHHHHH

SEQ ID NO: 158 - protein, 79 aa, Artificial Sequence
  Synthetic: CCL4
APMGSDPPTSCCFSYTSRQLHRSFVMDYYETSSLCSKPAVVFLTKRGRQICANPSEPWVTEYMSDLELNGGGSHHHHHH

SEQ ID NO: 159 - protein, 410 aa, Artificial Sequence
  Synthetic: CCL5- lumican
SPYGSDTTPCCFAYLSLALPRAHVKEYFYTSSKCSNLAVVFVTRRNRQVCANPEKKWVQEYINYLEMSGGGSGGGSGGGSQYYDYDIPLFMYGQISPNCAPECNCPHSYPTAMYCDDLKLKSVPMVPPGIKYLYLRNNQIDHIDEKAFENVTDLQWLILDHNLLENSKIKGKVFSKLKQLKKLHINYNNLTESVGPLPKSLQDLQLTNNKISKLGSFDGLVNLTFIYLQHNQLKEDAVSASLKGLKSLEYLDLSFNQMSKLPAGLPTSLLTLYLDNNKISNIPDEYFKRFTGLQYLRLSHNELADSGVPGNSFNISSLLELDLSYNKLKSIPTVNENLENYYLEVNELEKFDVKSFCKILGPLSYSKIKHLRLDGNPLTQSSLPPDMYECLRVANEITVNGGGSHHHHHH

SEQ ID NO: 160 - protein, 410 aa, Artificial Sequence
  Synthetic: Lumican  CCL5
QYYDYDIPLFMYGQISPNCAPECNCPHSYPTAMYCDDLKLKSVPMVPPGIKYLYLRNNQIDHIDEKAFENVTDLQWLILDHNLLENSKIKGKVFSKLKQLKKLHINYNNLTESVGPLPKSLQDLQLTNNKISKLGSFDGLVNLTFIYLQHNQLKEDAVSASLKGLKSLEYLDLSFNQMSKLPAGLPTSLLTLYLDNNKISNIPDEYFKRFTGLQYLRLSHNELADSGVPGNSFNISSLLELDLSYNKLKSIPTVNENLENYYLEVNELEKFDVKSFCKILGPLSYSKIKHLRLDGNPLTQSSLPPDMYECLRVANEITVNGGGSGGGSGGGSSPYGSDTTPCCFAYLSLALPRAHVKEYFYTSSKCSNLAVVFVTRRNRQVCANPEKKWVQEYINYLEMSGGGSHHHHHH

SEQ ID NO: 161 - protein, 78 aa, Artificial Sequence
  Synthetic: CCL5
SPYGSDTTPCCFAYLSLALPRAHVKEYFYTSSKCSNLAVVFVTRRNRQVCANPEKKWVQEYINYLEMSGGGSHHHHHH

SEQ ID NO: 162 - protein, 425 aa, Artificial Sequence
  Synthetic: CCL19-Lumican
GANDAEDCCLSVTQRPIPGNIVKAFRYLLNEDGCRVPAVVFTTLRGYQLCAPPDQPWVDRIIRRLKKSSAKNKGNSTRRSPVSGGGSGGGSGGGSQYYDYDIPLFMYGQISPNCAPECNCPHSYPTAMYCDDLKLKSVPMVPPGIKYLYLRNNQIDHIDEKAFENVTDLQWLILDHNLLENSKIKGKVFSKLKQLKKLHINYNNLTESVGPLPKSLQDLQLTNNKISKLGSFDGLVNLTFIYLQHNQLKEDAVSASLKGLKSLEYLDLSFNQMSKLPAGLPTSLLTLYLDNNKISNIPDEYFKRFTGLQYLRLSHNELADSGVPGNSFNISSLLELDLSYNKLKSIPTVNENLENYYLEVNELEKFDVKSFCKILGPLSYSKIKHLRLDGNPLTQSSLPPDMYECLRVANEITVNGGGSHHHHHH

SEQ ID NO: 163 - protein, 424 aa, Artificial Sequence
  Synthetic: Lumican  CCL19
QYYDYDIPLFMYGQISPNCAPECNCPHSYPTAMYCDDLKLKSVPMVPPGIKYLYLRNNQIDHIDEKAFENVTDLQWLILDHNLLENSKIKGKVFSKLKQLKKLHINYNNLTESVGPLPKSLQDLQLTNNKISKLGSFDGLVNLTFIYLQHNQLKEDAVSASLKGLKSLEYLDLSFNQMSKLPAGLPTSLLTLYLDNNKISNIPDEYFKRFTGLQYLRLSHNELADSGVPGNSFNISSLLELDLSYNKLKSIPTVNENLENYYLEVNELEKFDVKSFCKILGPLSYSKIKHLRLDGNPLTQSSLPPDMYECLRVANEITVNGGGSGGGSGGGGANDAEDCCLSVTQRPIPGNIVKAFRYLLNEDGCRVPAVVFTTLRGYQLCAPPDQPWVDRIIRRLKKSSAKNKGNSTRRSPVSGGGSHHHHHH

SEQ ID NO: 164 - protein, 93 aa, Artificial Sequence
  Synthetic: CCL19
GANDAEDCCLSVTQRPIPGNIVKAFRYLLNEDGCRVPAVVFTTLRGYQLCAPPDQPWVDRIIRRLKKSSAKNKGNSTRRSPVSGGGSHHHHHH

SEQ ID NO: 165 - protein, 452 aa, Artificial Sequence
  Synthetic: CCL21c - Lumican
SDGGGQDCCLKYSQKKIPYSIVRGYRKQEPSLGCPIPAILFLPRKHSKPELCANPEEGWVQNLMRRLDQPPAPGKQSPGCRKNRGTSKSGKKGKGSKGCKRTEQTQPSRGGGGSGGGSGGGSQYYDYDIPLFMYGQISPNCAPECNCPHSYPTAMYCDDLKLKSVPMVPPGIKYLYLRNNQIDHIDEKAFENVTDLQWLILDHNLLENSKIKGKVFSKLKQLKKLHINYNNLTESVGPLPKSLQDLQLTNNKISKLGSFDGLVNLTFIYLQHNQLKEDAVSASLKGLKSLEYLDLSFNQMSKLPAGLPTSLLTLYLDNNKISNIPDEYFKRFTGLQYLRLSHNELADSGVPGNSFNISSLLELDLSYNKLKSIPTVNENLENYYLEVNELEKFDVKSFCKILGPLSYSKIKHLRLDGNPLTQSSLPPDMYECLRVANEITVNGGGSHHHHHH

SEQ ID NO: 166 - protein, 451 aa, Artificial Sequence
  Synthetic: Lumican  CCL21c
QYYDYDIPLFMYGQISPNCAPECNCPHSYPTAMYCDDLKLKSVPMVPPGIKYLYLRNNQIDHIDEKAFENVTDLQWLILDHNLLENSKIKGKVFSKLKQLKKLHINYNNLTESVGPLPKSLQDLQLTNNKISKLGSFDGLVNLTFIYLQHNQLKEDAVSASLKGLKSLEYLDLSFNQMSKLPAGLPTSLLTLYLDNNKISNIPDEYFKRFTGLQYLRLSHNELADSGVPGNSFNISSLLELDLSYNKLKSIPTVNENLENYYLEVNELEKFDVKSFCKILGPLSYSKIKHLRLDGNPLTQSSLPPDMYECLRVANEITVNGGGSGGGSGGGSDGGGQDCCLKYSQKKIPYSIVRGYRKQEPSLGCPIPAILFLPRKHSKPELCANPEEGWVQNLMRRLDQPPAPGKQSPGCRKNRGTSKSGKKGKGSKGCKRTEQTQPSRGGGGSHHHHHH

SEQ ID NO: 167 - protein, 120 aa, Artificial Sequence
  Synthetic: CCL21c
SDGGGQDCCLKYSQKKIPYSIVRGYRKQEPSLGCPIPAILFLPRKHSKPELCANPEEGWVQNLMRRLDQPPAPGKQSPGCRKNRGTSKSGKKGKGSKGCKRTEQTQPSRGGGGSHHHHHH

SEQ ID NO: 168 - protein, 417 aa, Artificial Sequence
  Synthetic: truncated CCL21c-Lumican
SDGGGQDCCLKYSQKKIPYSIVRGYRKQEPSLGCPIPAILFLPRKHSKPELCANPEEGWVQNLMRRLDQPPAPGKGGGSGGGSGGGSQYYDYDIPLFMYGQISPNCAPECNCPHSYPTAMYCDDLKLKSVPMVPPGIKYLYLRNNQIDHIDEKAFENVTDLQWLILDHNLLENSKIKGKVFSKLKQLKKLHINYNNLTESVGPLPKSLQDLQLTNNKISKLGSFDGLVNLTFIYLQHNQLKEDAVSASLKGLKSLEYLDLSFNQMSKLPAGLPTSLLTLYLDNNKISNIPDEYFKRFTGLQYLRLSHNELADSGVPGNSFNISSLLELDLSYNKLKSIPTVNENLENYYLEVNELEKFDVKSFCKILGPLSYSKIKHLRLDGNPLTQSSLPPDMYECLRVANEITVNGGGSHHHHHH

SEQ ID NO: 169 - protein, 417 aa, Artificial Sequence
  Synthetic: Lumican  truncated CCL21c
QYYDYDIPLFMYGQISPNCAPECNCPHSYPTAMYCDDLKLKSVPMVPPGIKYLYLRNNQIDHIDEKAFENVTDLQWLILDHNLLENSKIKGKVFSKLKQLKKLHINYNNLTESVGPLPKSLQDLQLTNNKISKLGSFDGLVNLTFIYLQHNQLKEDAVSASLKGLKSLEYLDLSFNQMSKLPAGLPTSLLTLYLDNNKISNIPDEYFKRFTGLQYLRLSHNELADSGVPGNSFNISSLLELDLSYNKLKSIPTVNENLENYYLEVNELEKFDVKSFCKILGPLSYSKIKHLRLDGNPLTQSSLPPDMYECLRVANEITVNGGGSGGGSGGGSSDGGGQDCCLKYSQKKIPYSIVRGYRKQEPSLGCPIPAILFLPRKHSKPELCANPEEGWVQNLMRRLDQPPAPGKGGGSHHHHHH

SEQ ID NO: 170 - protein, 85 aa, Artificial Sequence
  Synthetic: truncated CCL21c
SDGGGQDCCLKYSQKKIPYSIVRGYRKQEPSLGCPIPAILFLPRKHSKPELCANPEEGWVQNLMRRLDQPPAPGKGGGSHHHHHH

SEQ ID NO: 171 - protein, 84 aa, Artificial Sequence
  Synthetic: CCL11
HPGSIPTSCCFIMTSKKIPNTLLKSYKRITNNRCTLKAIVFKTRLGKEICADPKKKWVQDATKHLDQKLQTPKPGGGSHHHHHH

SEQ ID NO: 172 - protein, 416 aa, Artificial Sequence
  Synthetic: CCL11  Lumican
HPGSIPTSCCFIMTSKKIPNTLLKSYKRITNNRCTLKAIVFKTRLGKEICADPKKKWVQDATKHLDQKLQTPKPGGGSGGGSGGGSQYYDYDIPLFMYGQISPNCAPECNCPHSYPTAMYCDDLKLKSVPMVPPGIKYLYLRNNQIDHIDEKAFENVTDLQWLILDHNLLENSKIKGKVFSKLKQLKKLHINYNNLTESVGPLPKSLQDLQLTNNKISKLGSFDGLVNLTFIYLQHNQLKEDAVSASLKGLKSLEYLDLSFNQMSKLPAGLPTSLLTLYLDNNKISNIPDEYFKRFTGLQYLRLSHNELADSGVPGNSFNISSLLELDLSYNKLKSIPTVNENLENYYLEVNELEKFDVKSFCKILGPLSYSKIKHLRLDGNPLTQSSLPPDMYECLRVANEITVNGGGSHHHHHH

SEQ ID NO: 173 - protein, 1107 aa, Artificial Sequence
  Synthetic: CLEC2- MSA- lumican
QQKYLLAEKENLSATLQQLAKKFCQELIRQSEIKTKSTFEHKCSPCATKWRYHGDSCYGFFRRNLTWEESKQYCTEQNATLVKTASQSTLDYIAERITSVRWIGLSRQNSKKDWMWEDSSVLRKNGINLSGNTEENMNCAYLHNGKIHPASCKERHYLICERNAGMTRVDQLLGGGSGGGSGGGSEAHKSEIAHRYNDLGEQHFKGLVLIAFSQYLQKCSYDEHAKLVQEVTDFAKTCVADESAANCDKSLHTLFGDKLCAIPNLRENYGELADCCTKQEPERNECFLQHKDDNPSLPPFERPEAEAMCTSFKENPTTFMGHYLHEVARRHPYFYAPELLYYAEQYNEILTQCCAEADKESCLTPKLDGVKEKALVSSVRQRMKCSSMQKFGERAFKAWAVARLSQTFPNADFAEITKLATDLTKVNKECCHGDLLECADDRAELAKYMCENQATISSKLQTCCDKPLLKKAHCLSEVEHDTMPADLPAIAADFVEDQEVCKNYAEAKDVFLGTFLYEYSRRHPDYSVSLLLRLAKKYEATLEKCCAEANPPACYGTVLAEFQPLVEEPKNLVKTNCDLYEKLGEYGFQNAILVRYTQKAPQVSTPTLVEAARNLGRVGTKCCTLPEDQRLPCVEDYLSAILNRVCLLHEKTPVSEHVTKCCSGSLVERRPCFSALTVDETYVPKEFKAETFTFHSDICTLPEKEKQIKKQTALAELVKHKPKATAEQLKTVMDDFAQFLDTCCKAADKDTCFSTEGPNLVTRCKDALAGGGSGGGSQYYDYDIPLFMYGQISPNCAPECNCPHSYPTAMYCDDLKLKSVPMVPPGIKYLYLRNNQIDHIDEKAFENVTDLQWLILDHNLLENSKIKGKVFSKLKQLKKLHINYNNLTESVGPLPKSLQDLQLTNNKISKLGSFDGLVNLTFIYLQHNQLKEDAVSASLKGLKSLEYLDLSFNQMSKLPAGLPTSLLTLYLDNNKISNIPDEYFKRFTGLQYLRLSHNELADSGVPGNSFNISSLLELDLSYNKLKSIPTVNENLENYYLEVNELEKFDVKSFCKILGPLSYSKIKHLRLDGNPLTQSSLPPDMYECLRVANEITVNGGGSHHHHHH

SEQ ID NO: 174 - protein, 775 aa, Artificial Sequence
  Synthetic: CLEC2- MSA
QQKYLLAEKENLSATLQQLAKKFCQELIRQSEIKTKSTFEHKCSPCATKWRYHGDSCYGFFRRNLTWEESKQYCTEQNATLVKTASQSTLDYIAERITSVRWIGLSRQNSKKDWMWEDSSVLRKNGINLSGNTEENMNCAYLHNGKIHPASCKERHYLICERNAGMTRVDQLLGGGSGGGSGGGSEAHKSEIAHRYNDLGEQHFKGLVLIAFSQYLQKCSYDEHAKLVQEVTDFAKTCVADESAANCDKSLHTLFGDKLCAIPNLRENYGELADCCTKQEPERNECFLQHKDDNPSLPPFERPEAEAMCTSFKENPTTFMGHYLHEVARRHPYFYAPELLYYAEQYNEILTQCCAEADKESCLTPKLDGVKEKALVSSVRQRMKCSSMQKFGERAFKAWAVARLSQTFPNADFAEITKLATDLTKVNKECCHGDLLECADDRAELAKYMCENQATISSKLQTCCDKPLLKKAHCLSEVEHDTMPADLPAIAADFVEDQEVCKNYAEAKDVFLGTFLYEYSRRHPDYSVSLLLRLAKKYEATLEKCCAEANPPACYGTVLAEFQPLVEEPKNLVKTNCDLYEKLGEYGFQNAILVRYTQKAPQVSTPTLVEAARNLGRVGTKCCTLPEDQRLPCVEDYLSAILNRVCLLHEKTPVSEHVTKCCSGSLVERRPCFSALTVDETYVPKEFKAETFTFHSDICTLPEKEKQIKKQTALAELVKHKPKATAEQLKTVMDDFAQFLDTCCKAADKDTCFSTEGPNLVTRCKDALAHHHHHH

SEQ ID NO: 175 - protein, 1061 aa, Artificial Sequence
  Synthetic: IFNg-MSA-lumican
HGTVIESLESLNNYFNSSGIDVEEKSLFLDIWRNWQKDGDMKILQSQIISFYLRLFEVLKDNQAISNNISVIESHLITTFFSNSKAKKDAFMSIAKFEVNNPQVQRQAFNELIRVVHQLLPESSLRKRKRSRCGSGGGSEAHKSEIAHRYNDLGEQHFKGLVLIAFSQYLQKCSYDEHAKLVQEVTDFAKTCVADESAANCDKSLHTLFGDKLCAIPNLRENYGELADCCTKQEPERNECFLQHKDDNPSLPPFERPEAEAMCTSFKENPTTFMGHYLHEVARRHPYFYAPELLYYAEQYNEILTQCCAEADKESCLTPKLDGVKEKALVSSVRQRMKCSSMQKFGERAFKAWAVARLSQTFPNADFAEITKLATDLTKVNKECCHGDLLECADDRAELAKYMCENQATISSKLQTCCDKPLLKKAHCLSEVEHDTMPADLPAIAADFVEDQEVCKNYAEAKDVFLGTFLYEYSRRHPDYSVSLLLRLAKKYEATLEKCCAEANPPACYGTVLAEFQPLVEEPKNLVKTNCDLYEKLGEYGFQNAILVRYTQKAPQVSTPTLVEAARNLGRVGTKCCTLPEDQRLPCVEDYLSAILNRVCLLHEKTPVSEHVTKCCSGSLVERRPCFSALTVDETYVPKEFKAETFTFHSDICTLPEKEKQIKKQTALAELVKHKPKATAEQLKTVMDDFAQFLDTCCKAADKDTCFSTEGPNLVTRCKDALAGGGSGGGSQYYDYDIPLFMYGQISPNCAPECNCPHSYPTAMYCDDLKLKSVPMVPPGIKYLYLRNNQIDHIDEKAFENVTDLQWLILDHNLLENSKIKGKVFSKLKQLKKLHINYNNLTESVGPLPKSLQDLQLTNNKISKLGSFDGLVNLTFIYLQHNQLKEDAVSASLKGLKSLEYLDLSFNQMSKLPAGLPTSLLTLYLDNNKISNIPDEYFKRFTGLQYLRLSHNELADSGVPGNSFNISSLLELDLSYNKLKSIPTVNENLENYYLEVNELEKFDVKSFCKILGPLSYSKIKHLRLDGNPLTQSSLPPDMYECLRVANEITVNGGGSHHHHHH

SEQ ID NO: 176 - protein, 1210 aa, Artificial Sequence
  Synthetic: IFNg  IFNg  MSA- lumican
HGTVIESLESLNNYFNSSGIDVEEKSLFLDIWRNWQKDGDMKILQSQIISFYLRLFEVLKDNQAISNNISVIESHLITTFFSNSKAKKDAFMSIAKFEVNNPQVQRQAFNELIRVVHQLLPESSLRKRKRSRCGGGSGGGSGGGSGGGSHGTVIESLESLNNYFNSSGIDVEEKSLFLDIWRNWQKDGDMKILQSQIISFYLRLFEVLKDNQAISNNISVIESHLITTFFSNSKAKKDAFMSIAKFEVNNPQVQRQAFNELIRVVHQLLPESSLRKRKRSRCGSGGGSEAHKSEIAHRYNDLGEQHFKGLVLIAFSQYLQKCSYDEHAKLVQEVTDFAKTCVADESAANCDKSLHTLFGDKLCAIPNLRENYGELADCCTKQEPERNECFLQHKDDNPSLPPFERPEAEAMCTSFKENPTTFMGHYLHEVARRHPYFYAPELLYYAEQYNEILTQCCAEADKESCLTPKLDGVKEKALVSSVRQRMKCSSMQKFGERAFKAWAVARLSQTFPNADFAEITKLATDLTKVNKECCHGDLLECADDRAELAKYMCENQATISSKLQTCCDKPLLKKAHCLSEVEHDTMPADLPAIAADFVEDQEVCKNYAEAKDVFLGTFLYEYSRRHPDYSVSLLLRLAKKYEATLEKCCAEANPPACYGTVLAEFQPLVEEPKNLVKTNCDLYEKLGEYGFQNAILVRYTQKAPQVSTPTLVEAARNLGRVGTKCCTLPEDQRLPCVEDYLSAILNRVCLLHEKTPVSEHVTKCCSGSLVERRPCFSALTVDETYVPKEFKAETFTFHSDICTLPEKEKQIKKQTALAELVKHKPKATAEQLKTVMDDFAQFLDTCCKAADKDTCFSTEGPNLVTRCKDALAGGGSGGGSQYYDYDIPLFMYGQISPNCAPECNCPHSYPTAMYCDDLKLKSVPMVPPGIKYLYLRNNQIDHIDEKAFENVTDLQWLILDHNLLENSKIKGKVFSKLKQLKKLHINYNNLTESVGPLPKSLQDLQLTNNKISKLGSFDGLVNLTFIYLQHNQLKEDAVSASLKGLKSLEYLDLSFNQMSKLPAGLPTSLLTLYLDNNKISNIPDEYFKRFTGLQYLRLSHNELADSGVPGNSFNISSLLELDLSYNKLKSIPTVNENLENYYLEVNELEKFDVKSFCKILGPLSYSKIKHLRLDGNPLTQSSLPPDMYECLRVANEITVNGGGSHHHHHH

SEQ ID NO: 177 - protein, 878 aa, Artificial Sequence
  Synthetic: IFNg  IFNg  MSA
HGTVIESLESLNNYFNSSGIDVEEKSLFLDIWRNWQKDGDMKILQSQIISFYLRLFEVLKDNQAISNNISVIESHLITTFFSNSKAKKDAFMSIAKFEVNNPQVQRQAFNELIRVVHQLLPESSLRKRKRSRCGGGSGGGSGGGSGGGSHGTVIESLESLNNYFNSSGIDVEEKSLFLDIWRNWQKDGDMKILQSQIISFYLRLFEVLKDNQAISNNISVIESHLITTFFSNSKAKKDAFMSIAKFEVNNPQVQRQAFNELIRVVHQLLPESSLRKRKRSRCGSGGGSEAHKSEIAHRYNDLGEQHFKGLVLIAFSQYLQKCSYDEHAKLVQEVTDFAKTCVADESAANCDKSLHTLFGDKLCAIPNLRENYGELADCCTKQEPERNECFLQHKDDNPSLPPFERPEAEAMCTSFKENPTTFMGHYLHEVARRHPYFYAPELLYYAEQYNEILTQCCAEADKESCLTPKLDGVKEKALVSSVRQRMKCSSMQKFGERAFKAWAVARLSQTFPNADFAEITKLATDLTKVNKECCHGDLLECADDRAELAKYMCENQATISSKLQTCCDKPLLKKAHCLSEVEHDTMPADLPAIAADFVEDQEVCKNYAEAKDVFLGTFLYEYSRRHPDYSVSLLLRLAKKYEATLEKCCAEANPPACYGTVLAEFQPLVEEPKNLVKTNCDLYEKLGEYGFQNAILVRYTQKAPQVSTPTLVEAARNLGRVGTKCCTLPEDQRLPCVEDYLSAILNRVCLLHEKTPVSEHVTKCCSGSLVERRPCFSALTVDETYVPKEFKAETFTFHSDICTLPEKEKQIKKQTALAELVKHKPKATAEQLKTVMDDFAQFLDTCCKAADKDTCFSTEGPNLVTRCKDALAHHHHHH

SEQ ID NO: 178 - protein, 1055 aa, Artificial Sequence
  Synthetic: Lumican  MSA - IFNg
QYYDYDIPLFMYGQISPNCAPECNCPHSYPTAMYCDDLKLKSVPMVPPGIKYLYLRNNQIDHIDEKAFENVTDLQWLILDHNLLENSKIKGKVFSKLKQLKKLHINYNNLTESVGPLPKSLQDLQLTNNKISKLGSFDGLVNLTFIYLQHNQLKEDAVSASLKGLKSLEYLDLSFNQMSKLPAGLPTSLLTLYLDNNKISNIPDEYFKRFTGLQYLRLSHNELADSGVPGNSFNISSLLELDLSYNKLKSIPTVNENLENYYLEVNELEKFDVKSFCKILGPLSYSKIKHLRLDGNPLTQSSLPPDMYECLRVANEITVNGGGSGGGSEAHKSEIAHRYNDLGEQHFKGLVLIAFSQYLQKCSYDEHAKLVQEVTDFAKTCVADESAANCDKSLHTLFGDKLCAIPNLRENYGELADCCTKQEPERNECFLQHKDDNPSLPPFERPEAEAMCTSFKENPTTFMGHYLHEVARRHPYFYAPELLYYAEQYNEILTQCCAEADKESCLTPKLDGVKEKALVSSVRQRMKCSSMQKFGERAFKAWAVARLSQTFPNADFAEITKLATDLTKVNKECCHGDLLECADDRAELAKYMCENQATISSKLQTCCDKPLLKKAHCLSEVEHDTMPADLPAIAADFVEDQEVCKNYAEAKDVFLGTFLYEYSRRHPDYSVSLLLRLAKKYEATLEKCCAEANPPACYGTVLAEFQPLVEEPKNLVKTNCDLYEKLGEYGFQNAILVRYTQKAPQVSTPTLVEAARNLGRVGTKCCTLPEDQRLPCVEDYLSAILNRVCLLHEKTPVSEHVTKCCSGSLVERRPCFSALTVDETYVPKEFKAETFTFHSDICTLPEKEKQIKKQTALAELVKHKPKATAEQLKTVMDDFAQFLDTCCKAADKDTCFSTEGPNLVTRCKDALAGGGSHGTVIESLESLNNYFNSSGIDVEEKSLFLDIWRNWQKDGDMKILQSQIISFYLRLFEVLKDNQAISNNISVIESHLITTFFSNSKAKKDAFMSIAKFEVNNPQVQRQAFNELIRVVHQLLPESSLRKRKRSRCHHHHHH

SEQ ID NO: 179 - protein, 1204 aa, Artificial Sequence
  Synthetic: Lumican  MSA  IFNg - IFNg
QYYDYDIPLFMYGQISPNCAPECNCPHSYPTAMYCDDLKLKSVPMVPPGIKYLYLRNNQIDHIDEKAFENVTDLQWLILDHNLLENSKIKGKVFSKLKQLKKLHINYNNLTESVGPLPKSLQDLQLTNNKISKLGSFDGLVNLTFIYLQHNQLKEDAVSASLKGLKSLEYLDLSFNQMSKLPAGLPTSLLTLYLDNNKISNIPDEYFKRFTGLQYLRLSHNELADSGVPGNSFNISSLLELDLSYNKLKSIPTVNENLENYYLEVNELEKFDVKSFCKILGPLSYSKIKHLRLDGNPLTQSSLPPDMYECLRVANEITVNGGGSGGGSEAHKSEIAHRYNDLGEQHFKGLVLIAFSQYLQKCSYDEHAKLVQEVTDFAKTCVADESAANCDKSLHTLFGDKLCAIPNLRENYGELADCCTKQEPERNECFLQHKDDNPSLPPFERPEAEAMCTSFKENPTTFMGHYLHEVARRHPYFYAPELLYYAEQYNEILTQCCAEADKESCLTPKLDGVKEKALVSSVRQRMKCSSMQKFGERAFKAWAVARLSQTFPNADFAEITKLATDLTKVNKECCHGDLLECADDRAELAKYMCENQATISSKLQTCCDKPLLKKAHCLSEVEHDTMPADLPAIAADFVEDQEVCKNYAEAKDVFLGTFLYEYSRRHPDYSVSLLLRLAKKYEATLEKCCAEANPPACYGTVLAEFQPLVEEPKNLVKTNCDLYEKLGEYGFQNAILVRYTQKAPQVSTPTLVEAARNLGRVGTKCCTLPEDQRLPCVEDYLSAILNRVCLLHEKTPVSEHVTKCCSGSLVERRPCFSALTVDETYVPKEFKAETFTFHSDICTLPEKEKQIKKQTALAELVKHKPKATAEQLKTVMDDFAQFLDTCCKAADKDTCFSTEGPNLVTRCKDALAGGGSHGTVIESLESLNNYFNSSGIDVEEKSLFLDIWRNWQKDGDMKILQSQIISFYLRLFEVLKDNQAISNNISVIESHLITTFFSNSKAKKDAFMSIAKFEVNNPQVQRQAFNELIRVVHQLLPESSLRKRKRSRCGGGSGGGSGGGSGGGSHGTVIESLESLNNYFNSSGIDVEEKSLFLDIWRNWQKDGDMKILQSQIISFYLRLFEVLKDNQAISNNISVIESHLITTFFSNSKAKKDAFMSIAKFEVNNPQVQRQAFNELIRVVHQLLPESSLRKRKRSRCHHHHHH

SEQ ID NO: 180 - protein, 876 aa, Artificial Sequence
  Synthetic: MSA- IFNg - IFNg
EAHKSEIAHRYNDLGEQHFKGLVLIAFSQYLQKCSYDEHAKLVQEVTDFAKTCVADESAANCDKSLHTLFGDKLCAIPNLRENYGELADCCTKQEPERNECFLQHKDDNPSLPPFERPEAEAMCTSFKENPTTFMGHYLHEVARRHPYFYAPELLYYAEQYNEILTQCCAEADKESCLTPKLDGVKEKALVSSVRQRMKCSSMQKFGERAFKAWAVARLSQTFPNADFAEITKLATDLTKVNKECCHGDLLECADDRAELAKYMCENQATISSKLQTCCDKPLLKKAHCLSEVEHDTMPADLPAIAADFVEDQEVCKNYAEAKDVFLGTFLYEYSRRHPDYSVSLLLRLAKKYEATLEKCCAEANPPACYGTVLAEFQPLVEEPKNLVKTNCDLYEKLGEYGFQNAILVRYTQKAPQVSTPTLVEAARNLGRVGTKCCTLPEDQRLPCVEDYLSAILNRVCLLHEKTPVSEHVTKCCSGSLVERRPCFSALTVDETYVPKEFKAETFTFHSDICTLPEKEKQIKKQTALAELVKHKPKATAEQLKTVMDDFAQFLDTCCKAADKDTCFSTEGPNLVTRCKDALAGGGSHGTVIESLESLNNYFNSSGIDVEEKSLFLDIWRNWQKDGDMKILQSQIISFYLRLFEVLKDNQAISNNISVIESHLITTFFSNSKAKKDAFMSIAKFEVNNPQVQRQAFNELIRVVHQLLPESSLRKRKRSRCGGGSGGGSGGGSGGGSHGTVIESLESLNNYFNSSGIDVEEKSLFLDIWRNWQKDGDMKILQSQIISFYLRLFEVLKDNQAISNNISVIESHLITTFFSNSKAKKDAFMSIAKFEVNNPQVQRQAFNELIRVVHQLLPESSLRKRKRSRCHHHHHH

SEQ ID NO: 181 - protein, 129 aa, Artificial Sequence
  Synthetic: LAIR  (H)6
QEGSLPDITIFPNSSLMISQGTFVTVVCSYSDKHDLYNMVRLEKDGSTFMEKSTEPYKTEDEFEIGPVNETITGHYSCIYSKGITWSERSKTLELKVIKENVIQTPAPGPTSDTSWLKTYSIYHHHHHH

SEQ ID NO: 182 - protein, 319 aa, Mus musculus
  misc_feature (1)..(319): Lumican (murine)
YYDYDIPLFMYGQISPNCAPECNCPHSYPTAMYCDDLKLKSVPMVPPGIKYLYLRNNQIDHIDEKAFENVTDLQWLILDHNLLENSKIKGKVFSKLKQLKKLHINYNNLTESVGPLPKSLQDLQLTNNKISKLGSFDGLVNLTFIYLQHNQLKEDAVSASLKGLKSLEYLDLSFNQMSKLPAGLPTSLLTLYLDNNKISNIPDEYFKRFTGLQYLRLSHNELADSGVPGNSFNISSLLELDLSYNKLKSIPTVNENLENYYLEVNELEKFDVKSFCKILGPLSYSKIKHLRLDGNPLTQSSLPPDMYECLRVANEITVN

SEQ ID NO: 183 - protein, 584 aa, Mus musculus
  misc_feature (1)..(584): murine MSA
EAHKSEIAHRYNDLGEQHFKGLVLIAFSQYLQKCSYDEHAKLVQEVTDFAKTCVADESAANCDKSLHTLFGDKLCAIPNLRENYGELADCCTKQEPERNECFLQHKDDNPSLPPFERPEAEAMCTSFKENPTTFMGHYLHEVARRHPYFYAPELLYYAEQYNEILTQCCAEADKESCLTPKLDGVKEKALVSSVRQRMKCSSMQKFGERAFKAWAVARLSQTFPNADFAEITKLATDLTKVNKECCHGDLLECADDRAELAKYMCENQATISSKLQTCCDKPLLKKAHCLSEVEHDTMPADLPAIAADFVEDQEVCKNYAEAKDVFLGTFLYEYSRRHPDYSVSLLLRLAKKYEATLEKCCAEANPPACYGTVLAEFQPLVEEPKNLVKTNCDLYEKLGEYGFQNAILVRYTQKAPQVSTPTLVEAARNLGRVGTKCCTLPEDQRLPCVEDYLSAILNRVCLLHEKTPVSEHVTKCCSGSLVERRPCFSALTVDETYVPKEFKAETFTFHSDICTLPEKEKQIKKQTALAELVKHKPKATAEQLKTVMDDFAQFLDTCCKAADKDTCFSTEGPNLVTRCKDALA

SEQ ID NO: 184 - protein, 213 aa, Artificial Sequence
  Synthetic: 3/23 LC  murine kappa
DTVLTQSPALAVSPGERVTISCRASESVSTRMHWYQQRPGQPPKLLIYVASRLESGVPARFSGGGSGTDFTLTIDPVEANDTATYFCQQSWNDPWTFGGGTKLELKRADAAPTVSIFPPSSEQLTSGGASVVCFLNNFYPKDINVKWKIDGSERQNGVLNSWTDQDSKDSTYSMSSTLTLTKDEYERHNSYTCEATHKTSTSPIVKSFNRNEC

SEQ ID NO: 185 - protein, 786 aa, Artificial Sequence
  Synthetic: 3/23 HC-lumican
EVQLVESGGGLVQPGRSLKLSCAASGFTLSDYYMAWVRQAPKKGLEWVASINYEGSSTYYGESVKGRFTISRDNAKSTLYLQMNSLRSEDTATYYCVRHDNYFDYWGQGVLVTVSSAKTTAPSVYPLAPVCGGTTGSSVTLGCLVKGYFPEPVTLTWNSGSLSSGVHTFPALLQSGLYTLSSSVTVTSNTWPSQTITCNVAHPASSTKVDKKIEPRVPITQNPCPPLKECPPCAAPDAAGGPSVFIFPPKIKDVLMISLSPMVTCVVVDVSEDDPDVQISWFVNNVEVHTAQTQTHREDYNSTLRVVSALPIQHQDWMSGKEFKCKVNNRALGSPIEKTISKPRGPVRAPQVYVLPPPAEEMTKKEFSLTCMITGFLPAEIAVDWTSNGRTEQNYKNTATVLDSDGSYFMYSKLRVQKSTWERGSLFACSVVHEGLHNHLTTKTISRSLGKGGGGSGGGGSGGGGSQYYDYDIPLFMYGQISPNCAPECNCPHSYPTAMYCDDLKLKSVPMVPPGIKYLYLRNNQIDHIDEKAFENVTDLQWLILDHNLLENSKIKGKVFSKLKQLKKLHINYNNLTESVGPLPKSLQDLQLTNNKISKLGSFDGLVNLTFIYLQHNQLKEDAVSASLKGLKSLEYLDLSFNQMSKLPAGLPTSLLTLYLDNNKISNIPDEYFKRFTGLQYLRLSHNELADSGVPGNSFNISSLLELDLSYNKLKSIPTVNENLENYYLEVNELEKFDVKSFCKILGPLSYSKIKHLRLDGNPLTQSSLPPDMYECLRVANEITVN

SEQ ID NO: 186 - protein, 869 aa, Artificial Sequence
  Synthetic: LAIR-MSA-IL2
QEGSLPDITIFPNSSLMISQGTFVTVVCSYSDKHDLYNMVRLEKDGSTFMEKSTEPYKTEDEFEIGPVNETITGHYSCIYSKGITWSERSKTLELKVIKENVIQTPAPGPTSDTSWLKTYSIYGGSEAHKSEIAHRYNDLGEQHFKGLVLIAFSQYLQKCSYDEHAKLVQEVTDFAKTCVADESAANCDKSLHTLFGDKLCAIPNLRENYGELADCCTKQEPERNECFLQHKDDNPSLPPFERPEAEAMCTSFKENPTTFMGHYLHEVARRHPYFYAPELLYYAEQYNEILTQCCAEADKESCLTPKLDGVKEKALVSSVRQRMKCSSMQKFGERAFKAWAVARLSQTFPNADFAEITKLATDLTKVNKECCHGDLLECADDRAELAKYMCENQATISSKLQTCCDKPLLKKAHCLSEVEHDTMPADLPAIAADFVEDQEVCKNYAEAKDVFLGTFLYEYSRRHPDYSVSLLLRLAKKYEATLEKCCAEANPPACYGTVLAEFQPLVEEPKNLVKTNCDLYEKLGEYGFQNAILVRYTQKAPQVSTPTLVEAARNLGRVGTKCCTLPEDQRLPCVEDYLSAILNRVCLLHEKTPVSEHVTKCCSGSLVERRPCFSALTVDETYVPKEFKAETFTFHSDICTLPEKEKQIKKQTALAELVKHKPKATAEQLKTVMDDFAQFLDTCCKAADKDTCFSTEGPNLVTRCKDALAGGGSAPTSSSTSSSTAEAQQQQQQQQQQQQHLEQLLMDLQELLSRMENYRNLKLPRMLTFKFYLPKQATELKDLQCLEDELGPLRHVLDLTQSKSFQLEDAENFISNIRVTVVKLKGSDNTFECQFDDESATVVDFLRRWIAFCQSIISTSPQHHHHHH

SEQ ID NO: 187 - protein, 123 aa, Artificial Sequence
  Synthetic: LAIR30.w.A
QEGSLPDITIFPNSSLMISQGTFVTVACSYSDKHDLYNMVRLEKGGSTFMEKSTEPYKTEDEFEIGPVNETITGHYSCIYSKGITWSERSKTLELKVIKENVIQTPAPGPTSDTSWLKTYSIY

SEQ ID NO: 188 - protein, 123 aa, Artificial Sequence
  Synthetic: LAIR30.w.B
QEGSLPDITIFPNSSLMISQGTFVTVVCSYSDKHDLYNMVRLEKDGSTSMEKSTEPYKTEDEFEIGPVNETITGHYSCIYSKGITWSERSKTLELKVIKENVIQTPAPGPTSDTSWLKTYSIY

SEQ ID NO: 189 - protein, 123 aa, Artificial Sequence
  Synthetic: LAIR30.w.C
QEGSLPDITIFPNSSLMISQGTFVTVVCSYSDKHDLYNMVRLEKDGSTFMGKSTEPYKTEDEFEIGPVNETITGHYSCIYSKGITWSERSKTLELKVIKENVIQTPAPGPTSDTSWLKTYSIY

SEQ ID NO: 190 - protein, 123 aa, Artificial Sequence
  Synthetic: LAIR30.d.D
QEGSLPDITIFPNSSLMISQGTFVTVVCSYSDKHDLYNMVRLAKDGSTFMEKSTEPYKTEDEFEIGPVNETITGHYSCIYSKGITWSERSKTLELKVIKENVIQTPAPGPTSDTSWLKTYSIY

SEQ ID NO: 191 - protein, 123 aa, Artificial Sequence
  Synthetic: LAIR30.w.E
QEGSLPDITIFPNSSLMISQGTFVTVVCSYSDKHDLYNMVRLEKDGSTFMEKSTEPYKTEDELEIGPVNETITGHYSCIYSKGITWSERSKTLELKVIKENVIQTPAPGPTSDTSWLKTYSIY

SEQ ID NO: 192 - protein, 123 aa, Artificial Sequence
  Synthetic: LAIR30.w.F
QEGSLPDITIFPNSSLMISQGTFVTVVCSYSDKHDLYNMVRLEKDGSTFMEKSTEPYKTEDEFEIGPVNETITGHYSCIYSKGITWSERAKTLELKVIKENVIQTPAPGPTSDTSWLKTYSIY

SEQ ID NO: 193 - protein, 123 aa, Artificial Sequence
  Synthetic: LAIR30.2.K1.B
QEGSLPDITIFPNSSLVISQGTFVTVVCSYSDKHDLYNMVRLEKDGSTFMEKSTAPYKTEDEFEIGPVNETITGHYSCIYSKGITWSERSKTLELKVIKENVIQTPAPGPTSDTLWLKTYSIY

SEQ ID NO: 194 - protein, 720 aa, Artificial Sequence
  Synthetic: LAIR-MSA
QEGSLPDITIFPNSSLMISQGTFVTVVCSYSDKHDLYNMVRLEKDGSTFMEKSTEPYKTEDEFEIGPVNETITGHYSCIYSKGITWSERSKTLELKVIKENVIQTPAPGPTSDTSWLKTYSIYGGSEAHKSEIAHRYNDLGEQHFKGLVLIAFSQYLQKCSYDEHAKLVQEVTDFAKTCVADESAANCDKSLHTLFGDKLCAIPNLRENYGELADCCTKQEPERNECFLQHKDDNPSLPPFERPEAEAMCTSFKENPTTFMGHYLHEVARRHPYFYAPELLYYAEQYNEILTQCCAEADKESCLTPKLDGVKEKALVSSVRQRMKCSSMQKFGERAFKAWAVARLSQTFPNADFAEITKLATDLTKVNKECCHGDLLECADDRAELAKYMCENQATISSKLQTCCDKPLLKKAHCLSEVEHDTMPADLPAIAADFVEDQEVCKNYAEAKDVFLGTFLYEYSRRHPDYSVSLLLRLAKKYEATLEKCCAEANPPACYGTVLAEFQPLVEEPKNLVKTNCDLYEKLGEYGFQNAILVRYTQKAPQVSTPTLVEAARNLGRVGTKCCTLPEDQRLPCVEDYLSAILNRVCLLHEKTPVSEHVTKCCSGSLVERRPCFSALTVDETYVPKEFKAETFTFHSDICTLPEKEKQIKKQTALAELVKHKPKATAEQLKTVMDDFAQFLDTCCKAADKDTCFSTEGPNLVTRCKDALAGGGSHHHHHH

SEQ ID NO: 195 - protein, 476 aa, Artificial Sequence
  Synthetic: 4420 HC-LAIR
DVKLDETGGGLVQPGRPMKLSCVASGFTFSDYWMNWVRQSPEKGLEWVAQIRNKPYNYETYYSDSVKGRFTISRDDSKSSVYLQMNNLRVEDMGIYYCTGSYYGMDYWGQGTSVTVSATTKGPSVYPLAPGSAAQTNSMVTLGCLVKGYFPEPVTVTWNSGSLSSGVHTFPAVLQSDLYTLSSSVTVPSSTWPSQTVTCNVAHPASSTKVDKKIVPRDCGCKPCICTVPEVSSVFIFPPKPKDVLTITLTPKVTCVVVDISKDDPEVQFSWFVDDVEVHTAQTKPREEQINSTFRSVSELPIMHQDWLNGKEFKCRVNSAAFPAPIEKTISKTKGRPKGGGGSGGGGSGGGGSQEGSLPDITIFPNSSLMISQGTFVTVVCSYSDKHDLYNMVRLEKDGSTFMEKSTEPYKTEDEFEIGPVNETITGHYSCIYSKGITWSERSKTLELKVIKENVIQTPAPGPTSDTSWLKTYSIY

SEQ ID NO: 196 - protein, 475 aa, Artificial Sequence
  Synthetic: 3/23 HC-LAIR
EVQLVESGGGLVQPGRSLKLSCAASGFTLSDYYMAWVRQAPKKGLEWVASINYEGSSTYYGESVKGRFTISRDNAKSTLYLQMNSLRSEDTATYYCVRHDNYFDYWGQGVLVTVSSATTKGPSVYPLAPGSAAQTNSMVTLGCLVKGYFPEPVTVTWNSGSLSSGVHTFPAVLQSDLYTLSSSVTVPSSTWPSQTVTCNVAHPASSTKVDKKIVPRDCGCKPCICTVPEVSSVFIFPPKPKDVLTITLTPKVTCVVVDISKDDPEVQFSWFVDDVEVHTAQTKPREEQINSTFRSVSELPIMHQDWLNGKEFKCRVNSAAFPAPIEKTISKTKGRPKGGGGSGGGGSGGGGSQEGSLPDITIFPNSSLMISQGTFVTVVCSYSDKHDLYNMVRLEKDGSTFMEKSTEPYKTEDEFEIGPVNETITGHYSCIYSKGITWSERSKTLELKVIKENVIQTPAPGPTSDTSWLKTYSIY

SEQ ID NO: 197 - protein, 479 aa, Artificial Sequence
  Synthetic: LOB12.3 HC-LAIR
DVQLVESGGGLVQPGRSLKLSCAASGFIFSYFDMAWVRQAPTKGLEWVASISPDGSIPYYRDSVKGRFTVSRENAKSSLYLQMDSLRSEDTATYYCARRSYGGYSEIDYWGQGVMVTVSSATTKGPSVYPLAPGSAAQTNSMVTLGCLVKGYFPEPVTVTWNSGSLSSGVHTFPAVLQSDLYTLSSSVTVPSSTWPSQTVTCNVAHPASSTKVDKKIVPRDCGCKPCICTVPEVSSVFIFPPKPKDVLTITLTPKVTCVVVDISKDDPEVQFSWFVDDVEVHTAQTKPREEQINSTFRSVSELPIMHQDWLNGKEFKCRVNSAAFPAPIEKTISKTKGRPKGGGGSGGGGSGGGGSQEGSLPDITIFPNSSLMISQGTFVTVVCSYSDKHDLYNMVRLEKDGSTFMEKSTEPYKTEDEFEIGPVNETITGHYSCIYSKGITWSERSKTLELKVIKENVIQTPAPGPTSDTSWLKTYSIY

SEQ ID NO: 198 - protein, 476 aa, Artificial Sequence
  Synthetic: OX86 HC-LAIR
QVQLKESGPGLVQPSQTLSLTCTVSGFSLTGYNLHWVRQPPGKGLEWMGRMRYDGDTYYNSVLKSRLSISRDTSKNQVFLKMNSLQTDDTAIYYCTRDGRGDSFDYWGQGVMVTVSSATTKGPSVYPLAPGSAAQTNSMVTLGCLVKGYFPEPVTVTWNSGSLSSGVHTFPAVLQSDLYTLSSSVTVPSSTWPSQTVTCNVAHPASSTKVDKKIVPRDCGCKPCICTVPEVSSVFIFPPKPKDVLTITLTPKVTCVVVDISKDDPEVQFSWFVDDVEVHTAQTKPREEQINSTFRSVSELPIMHQDWLNGKEFKCRVNSAAFPAPIEKTISKTKGRPKGGGGSGGGGSGGGGSQEGSLPDITIFPNSSLMISQGTFVTVVCSYSDKHDLYNMVRLEKDGSTFMEKSTEPYKTEDEFEIGPVNETITGHYSCIYSKGITWSERSKTLELKVIKENVIQTPAPGPTSDTSWLKTYSIY

SEQ ID NO: 199 - protein, 475 aa, Artificial Sequence
  Synthetic: 2C11 HC-LAIR
EVQLVESGGGLVQPGKSLKLSCEASGFTFSGYGMHWVRQAPGRGLESVAYITSSSINIKYADAVKGRFTVSRDNAKNLLFLQMNILKSEDTAMYYCARFDWDKNYWGQGTMVTVSSATTKGPSVYPLAPGSAAQTNSMVTLGCLVKGYFPEPVTVTWNSGSLSSGVHTFPAVLQSDLYTLSSSVTVPSSTWPSQTVTCNVAHPASSTKVDKKIVPRDCGCKPCICTVPEVSSVFIFPPKPKDVLTITLTPKVTCVVVDISKDDPEVQFSWFVDDVEVHTAQTKPREEQINSTFRSVSELPIMHQDWLNGKEFKCRVNSAAFPAPIEKTISKTKGRPKGGGGSGGGGSGGGGSQEGSLPDITIFPNSSLMISQGTFVTVVCSYSDKHDLYNMVRLEKDGSTFMEKSTEPYKTEDEFEIGPVNETITGHYSCIYSKGITWSERSKTLELKVIKENVIQTPAPGPTSDTSWLKTYSIY

SEQ ID NO: 200 - protein, 27 aa, Artificial Sequence
  Synthetic: Linker
  misc_feature (12)..(26): "Glu Ala Ala Ala Lys" may or may not be present
AEAAAKEAAAKEAAAKEAAAKEAAAKA

SEQ ID NO: 201 - protein, 4 aa, Artificial Sequence
  Synthetic: Linker
GGSG

SEQ ID NO: 202 - protein, 20 aa, Artificial Sequence
  Synthetic: Linker
  misc_feature (5)..(20): "Gly Gly Ser Gly" may or may not be present
GGSGGGSGGGSGGGSGGGSG

SEQ ID NO: 203 - protein, 4 aa, Artificial Sequence
  Synthetic: Linker
GSAT

SEQ ID NO: 204 - protein, 30 aa, Artificial Sequence
  Synthetic: Linker
  misc_feature (7)..(30): "Gly Gly Ser Gly Gly Ser" may or may not be present
GGSGGSGGSGGSGGSGGSGGSGGSGGSGGS

SEQ ID NO: 205 - DNA, 25 bp, Artificial Sequence
  Synthetic: lipophilic-CpG oligonucleotide
  misc_feature (1)..(1): 5 lipophilic compound, such as diacyl lipid
  misc_feature (1)..(1): 5' lipophilic compound, such as diacyl lipid
  misc_feature (2)..(5): g may or may not be present
gggggtccatgacgttcctgacgtt

SEQ ID NO: 206 - DNA, 12 bp, Artificial Sequence
  Synthetic: oligonucleotide linker
  misc_feature (1)..(1): 5' lipo
ttttttttttcg

SEQ ID NO: 207 - DNA, 12 bp, Artificial Sequence
  Synthetic: oligonucleotide linker
  misc_feature (1)..(1): 5' lipo
ggttttttttcg

SEQ ID NO: 208 - DNA, 12 bp, Artificial Sequence
  Synthetic: oligonucleotide linker
  misc_feature (1)..(1): 5' lipo
ggggttttttcg

SEQ ID NO: 209 - DNA, 12 bp, Artificial Sequence
  Synthetic: oligonucleotide linker
  misc_feature (1)..(1): 5' lipo
ggggggttttcg

SEQ ID NO: 210 - DNA, 12 bp, Artificial Sequence
  Synthetic: oligonucleotide linker
  misc_feature (1)..(1): 5' lipo
ggggggggttcg

SEQ ID NO: 211 - DNA, 12 bp, Artificial Sequence
  Synthetic: oligonucleotide linker
  misc_feature (1)..(1): 5' lipo
ggggggggggcg

SEQ ID NO: 212 - protein, 37 aa, Artificial Sequence
  Synthetic: soluble collagen peptide mimic
  misc_feature (3)..(3): Xaa is a hydroxyproline amino acid
  misc_feature (6)..(6): Xaa is a hydroxyproline amino acid
  misc_feature (9)..(9): Xaa is a hydroxyproline amino acid
  misc_feature (12)..(12): Xaa is a hydroxyproline amino acid
  misc_feature (15)..(15): Xaa is a hydroxyproline amino acid
  misc_feature (18)..(18): Xaa is a hydroxyproline amino acid
  misc_feature (21)..(21): Xaa is a hydroxyproline amino acid
  misc_feature (24)..(24): Xaa is a hydroxyproline amino acid
  misc_feature (27)..(27): Xaa is a hydroxyproline amino acid
  misc_feature (30)..(30): Xaa is a hydroxyproline amino acid
  misc_feature (33)..(33): Xaa is a hydroxyproline amino acid
  misc_feature (36)..(36): Xaa is a hydroxyproline amino acid
  misc_feature (37)..(37): NH2 group at 3' end
GCXGPXGPXGPXGPXGPXGPXGPXGPXGPXGPXGCXG

1. An immunomodulatory fusion protein comprising:
(i) an immunomodulatory domain;
(ii) a collagen-binding domain, wherein the collagen-binding domain specifically binds type I and/or type IV collagen and binds type I collagen with a K_{D}≤500 nM, and wherein the collagen-binding domain has an isoelectric point pI<10 and a molecular weight (MW) of ≥5 kDa; and
(iii) optionally, a linker,
wherein the immunomodulatory domain is operably linked with or without the linker to the collagen-binding domain.

2-3. (canceled)

4. The immunomodulatory fusion protein of claim 1, wherein the collagen-binding domain comprises
(i) one or more leucine-rich repeats from a human proteoglycan Class II member of the small leucine-rich proteoglycan (SLRP) family comprising lumican, decorin, biglycan, fibromodulin, chondroadherin, asporin, PRELP, osteoadherin/osteomodulin, opticin, osteoglycin/mimecan, podocan, perlecan, and nidogen; or
(ii) a human type I glycoprotein having an Ig-like domain selected from LAIR1, LAIR2, and Glycoprotein IV, or an extracellular portion thereof which binds collagen, or variants thereof.

5-11. (canceled)

12. The immunomodulatory fusion protein of claim 4, wherein the lumican comprises the amino acid sequence as set forth in SEQ ID NO: 107.

13-16. (canceled)

17. The immunomodulatory fusion protein of claim 4, wherein the human type I glycoprotein is LAIR1 or a variant thereof and the collagen-binding domain comprises (j) amino acid residues 22-122 of the amino acid sequence as set forth in SEQ ID NO: 98, (ii) one or more amino acid substitutions, additions or deletions, optionally two, three, four, five, six, seven, eight, nine, ten or more amino acid substitutions, additions or deletions relative to a LAIR1 protein comprising the amino acid sequence of SEQ ID NO: 98, or (iii) an increased or decreased binding affinity to collagen relative to a collagen binding affinity of a LAIR1 protein comprising the amino acid sequence of SEQ ID NO: 98.

18-20. (canceled)

21. The immunomodulatory fusion protein of claim 1, wherein the immunomodulatory domain comprises a polypeptide that (i) activates, enhances or promotes a response by an immune cell, or (ii) inhibits, reduces or suppresses a response by an immune cell.

22. (canceled)

23. The immunomodulatory fusion protein of claim 21, wherein the immune cell is a lymphoid cell selected from an innate lymphoid cell, a T cell, a B cell, an NK cell, a monocyte, a neutrophil, a granulocyte, a mast cell, a macrophage, a dendritic cell, or a combination thereof.

24. (canceled)

25. The immunomodulatory fusion protein of claim 21, wherein the response by the immune cell comprises cytokine production, antibody production, production of antigen-specific immune cells, increased effector function and/or cytotoxicity, or a combination thereof.

26. The immunomodulatory fusion protein of claim 1, wherein the immunomodulatory domain comprises one or more selected from a cytokine, a chemokine, an activating ligand/receptor, an inhibitory ligand/receptor, an agonist antibody, an antagonist antibody, or a combination thereof.

27. (canceled)

28. The immunomodulatory fusion protein of claim 26, wherein the cytokine is (i) a human gamma common chain receptor interleukin selected from IL-2, IL-4, IL-7, IL-9, IL-13, IL-15, IL-15/IL-15RA, IL-21, or a combination thereof; (ii) a human IL-12 family member selected from IL-12 (p35), IL-12 (p40), IL-12(p35)/IL-12(p40), IL-23, IL-27 IL-35, or a combination thereof, (iii) a human IL-1 family member selected from IL-1, IL-18, IL-33, or a combination thereof, or (iv) TNFα, INFα, IFN-γ, GM-CSF, FLT3L, G-CSF, M-CSF, or a combination thereof.

29-34. (canceled)

35. The immunomodulatory fusion protein of claim 26, wherein the immunomodulatory domain comprises one or more chemokines selected from LIF, MIP-2, MIP-1α, MIP-1β, CXCL1, CXCL9, CXCL10, MCP-1, Eotaxin, RANTES, LIX, CCL3, CCL4, CCL5, Eotaxin or a combination thereof.

36-37. (canceled)

38. The immunomodulatory fusion protein of claim 26, wherein the immunomodulatory domain comprises one or more activating ligands/receptors selected from
(i) a TNF superfamily ligand selected from TNF-alpha, CD40L, 4-1BBL, OX40, or an antibody or antigen binding fragment thereof selected from an anti-TNFR1 antibody, an anti-TNFR2 antibody, an anti-CD40 antibody, an anti-4-1BB antibody and an anti-OX40 antibody;
(ii) a CD28 receptor superfamily or a B7 ligand family-selected from ICOS ligand, CD80, CD86, or an antibody or antigen binding fragment thereof selected from an anti-ICOS antibody and an anti-CD28 antibody; or
(iii) a T cell receptor comprising an antibody or antigen binding fragment thereof selected from an anti-CD3γ antibody, an anti-CD3δ antibody, an anti-CD3ζ antibody, and an anti-CD3ε antibody.

39-44. (canceled)

45. The immunomodulatory fusion protein of claim 26, wherein the immunomodulatory domain comprises one or more inhibitory ligands/receptors selected from (i) a CD28 receptor superfamily member comprising an antibody or antigen binding fragment thereof selected from an anti-PD-1 antibody, an anti-PD-L1 antibody, an anti-PD-L2 antibody, an anti-CTLA4 antibody,
(ii) a TNF superfamily member comprises an antibody or antigen binding fragment selected from an anti-TIGIT antibody and an anti-BTLA antibody, or (iii) a checkpoint inhibitor member comprising an antibody or antigen binding fragment selected from an anti-VISTA antibody, an anti-TIM-3 antibody, an anti-LAG-3 antibody, an anti-CD47 antibody, and an anti-SIRPα antibody.

46-49. (canceled)

50. The immunomodulatory fusion protein of claim 1, wherein the immunomodulatory domain is operably linked to the collagen-binding domain via a linker of sufficient length or mass to reduce adsorption of the immunomodulatory domain onto collagen fibrils, and/or provides sufficient molecular weight to the fusion protein reduce diffusion from a tissue, optionally wherein the linker allows for steric separation of the immunomodulatory domain from collagen fibrils to promote receptor/ligand engagement.

51-53. (canceled)

54. The immunomodulatory fusion protein of claim 50, wherein the linker (i) is a hydrophilic polypeptide comprising “N” amino acids in length, wherein 1-1000, 10-900, 30-800, 40-700, 50-600, 100-500, or 200-400, (ii) is human serum albumin or fragment thereof, or (iii) comprises an Fc domain or a mutant Fc domain with reduced FcR interaction.

55-56. (canceled)

57. The immunomodulatory fusion protein of claim 1, wherein the fusion protein is of sufficient mass to reduce size dependent escape by diffusion or convection upon administration in vivo, optionally wherein the fusion protein is >60 kDa.

58. (canceled)

59. The immunomodulatory fusion protein of claim 50, wherein the fusion protein binds type I and/or type IV collagen upon administration in vivo, thereby reducing systemic exposure of the immunomodulatory fusion protein.

60-146. (canceled)

147. A pharmaceutical composition comprising an immunomodulatory fusion protein of claim 1, and a pharmaceutically acceptable carrier.

148. A nucleic acid comprising a nucleotide sequence encoding an immunomodulatory fusion protein of claim 1.

149. An expression vector comprising the nucleic acid of claim 148.

150. A cell transformed with an expression vector of claim 149.

151. A method for producing an immunomodulatory fusion protein, the method comprising maintaining a cell according to claim 150 under conditions permitting expression of the immunomodulatory fusion protein.

152. (canceled)

153. A method for activating, enhancing or promoting a response by an immune cell in a subject or inhibiting, reducing or suppressing a response by an immune cell in a subject, comprising administering to a subject in need thereof, an effective amount of the pharmaceutical composition of claim 147.

154-158. (canceled)

159. A method for treating cancer, or reducing or inhibiting tumor growth, comprising administering to a subject in need thereof, an effective amount of the pharmaceutical composition of claim 147.

160-162. (canceled)

163. The method of claim 159, wherein infiltration of immune cells into a tumor microenvironment is increased after administration of the pharmaceutical composition.

164-166. (canceled)

167. A kit comprising a container comprising a pharmaceutical composition of claim 147, and a package insert comprising instructions for administration of the pharmaceutical composition alone or in combination with another agent, for treating or delaying progression of cancer or reducing or inhibiting tumor growth in a subject in need thereof.

168-170. (canceled)

171. A method for reducing or inhibiting tumor growth or treating cancer in a subject, the method comprising administering to a subject in need thereof, an effective amount of the pharmaceutical composition of claim 147, and an effective amount of a second composition comprising (i) a tumor antigen-targeting antibody, optionally wherein the tumor antigen is a tumor-associated antigen (TAA), a tumor-specific antigen (TSA), or a tumor neoantigen and/or wherein the tumor antigen-targeting antibody specifically binds human HER-2/neu, EGFR, VEGFR, CD20, CD33, CD38 or antigen-binding fragment thereof, (ii) a cancer vaccine, optionally wherein the cancer vaccine is a peptide comprising one or more tumor-associated antigens, or a population of cells immunized in vitro with a tumor antigen and administered to the subject, (iii) an immune checkpoint inhibitor, optionally comprising an antibody or antigen binding fragment thereof which binds PD-1, PD-L1, CTLA-4, LAG3, or TIM3, or (iv) an adoptive cell therapy, optionally comprising an immune effector cell comprising a chimeric antigen receptor (CAR) molecule which binds to a tumor antigen, thereby reducing or inhibiting tumor growth or treating cancer in the subject.

172-176. (canceled)

177. The method of claim 171, wherein the cancer vaccine is an amphiphilic peptide conjugate comprising a tumor-associated antigen, a lipid, and optionally a linker, wherein the amphiphilic peptide conjugate binds albumin under physiological conditions, optionally wherein the cancer vaccine further comprises an adjuvant.

178-182. (canceled)

183. The method of claim 171, wherein the CAR molecule comprises an antigen binding domain, a transmembrane domain, and an intracellular domain comprising a costimulatory domain and/or a primary signaling domain, wherein the antigen binding domain binds to the tumor antigen associated with the disease, optionally wherein the tumor antigen is selected from CD19, EGFR, Her2/neu, CD30 and BCMA.

184-201. (canceled)
